(19) United States
(12) Patent Application Publication
(10) Pub. No.: US 2005/0136049 A1
(43) Pub. Date: Jun. 23, 2005

(54) Binding constructs and methods for use thereof

(76) Inventors: Jeffrey A. Ledbetter, Shoreline, WA (US); Martha Hayden-Ledbetter, Shoreline, WA (US); Peter A. Thompson, Bellevue, WA (US)

Correspondence Address: BUCHANAN INGERSOLL, P.C., ONE OXFORD CENTRE, 301 GRANT STREET, 20TH FLOOR, PITTSBURGH, PA, 15219, US

(21) Appl. No.: 10/627,556

(22) Filed: Jul. 26, 2003

Related U.S. Application Data
(63) Continuation-in-part of application No. 10/053,530, filed on Jan. 17, 2002.
(60) Provisional application No. 60/367,358, filed on Jan. 17, 2001.

(51) Int. Cl. A61K 39/395; C07K 16/44

(52) U.S. Cl. 424/132.1; 530/387.3

(57) ABSTRACT

The invention relates to novel binding domain-immunoglobulin fusion proteins that feature a binding domain for a cognate structure such as an antigen, a counterreceptor or the like, a wild-type IgG1, IGA or IgE hinge-acting region, i.e., IgE CH2, region polypeptide or a mutant IgG1 hinge region polypeptide having either zero, one or two cysteine residues, and immunoglobulin CH2 and CH3 domains, and that are capable of ADCC and/or CDC while occurring predominantly as polypeptides that are compromised in their ability to form disulfide-linked multimers. The fusion proteins can be recombinantly produced at high expression levels. Also provided are related compositions and methods, including cell surface forms of the fusion proteins and immunotherapeutic applications of the fusion proteins and of polynucleotides encoding such fusion proteins.

### CROSS REFERENCE TO RELATED APPLICATIONS

[0001] This application is a Continuation-in-Part of U.S. Ser. No. 10/053,530, filed Jan. 17, 2002, which is incorporated herein by reference in its entirety and which claims the benefit of priority of U.S. Provisional Application Ser. No. 60/367,358 (formerly U.S. Ser. No. 09/765,208, filed Jan. 17, 2001), also incorporated herein by reference in its entirety and for which a Petition to Convert a Non-Provisional Application to a Provisional Application was filed on Jan. 16, 2002, and granted on Jun. 6, 2002. This application also claims the benefit of priority of U.S. Provisional Application No. 60/385,691 filed on Jun. 3, 2002, and entitled “Recombinant Signaling Receptors for Tumor Gene Therapy,” which is also incorporated herein by reference in its entirety.

### FIELD OF THE INVENTION

[0002] The present invention relates generally to compounds having various utilities including uses for research, diagnostics, and therapy, for example, immunotherapy. Compounds of the invention include immunologically active proteins and protein conjugates. Such proteins include recombinant or engineered binding proteins such as, for example, binding domain-immunoglobulin fusion proteins, which may include single chain Fv-immunoglobulin fusion proteins and compounds containing single chain Fv-immunoglobulins. The present invention also relates to compositions and methods for treating conditions, diseases and disorders that would improved, eased, or lessened from the administration of, for example, polypeptide and/or nucleic acid constructs of the invention, including, for example, malignant conditions and B cell disorders, including diseases characterized by autoantibody production and/or inflammation.

### BACKGROUND OF THE INVENTION

[0003] The immune system is one of the most complex of the body's many intricate systems. A vast and complicated arrangement made up of many different types of cells and involving many different kinds of molecules, the human immune system allows the body to respond to foreign invaders such as bacteria, viruses, and other infectious agents, as well as foreign material such as pollen. In general, the human immune system is divided into two main parts, antibody-mediated immunity (also called “humoral” or “circulating” immunity) and cell-mediated immunity, both of which are managed by lymphocytes. Lymphocytes are one of the five kinds of white blood cells (leukocytes) circulating in the blood. There are several kinds of lymphocytes, each with different functions to perform. The most common types of lymphocytes are B lymphocytes (B cells), which are responsible for making antibodies, and T lymphocytes (T cells). Cells of the immune system not only include T cells and B cells, but also Natural Killer Cells, granulocytes (or polymorphonuclear (PMN) leukocytes), macrophages, and dendritic cells. The humoral system is managed by B cells with help from T cells and deals with infectious agents in the blood and tissues of the body. The cell-mediated system is managed by T cells and deals with cells of the body that have been infected.

[0004] An antigen is a substance, usually macromolecular, that stimulates or induces an immune response. Because of its complex macromolecular structure, a single microorganism consists of multiple antigens (e.g., surface structures such as cell wall components, fimbriae, flagella, etc., or extracellular proteins, such as toxins or enzymes produced by the microorganism). The coat proteins and some of the envelope proteins of animal viruses are also usually antigenic. A host is generally able to respond specifically to antigens that come into contact with components of its immune system. Both the antibody-mediated immunity and cell-mediated immunity systems involve complex interrelationships that allow them to mount immune reactions to almost any antigen. In other words, the immune system is able to recognize foreign substances (antigens) that stimulate the system to produce antibody-mediated immunity, cell-mediated immunity, or both.

[0005] The immune system complex is constituted by a variety of different cell types and organs disseminated throughout the body. These include the primary lymphoid organs, i.e., the bone marrow and the thymus. All the cells of the immune system are initially derived from the bone marrow in a process called hematopoiesis. During hematopoiesis bone marrow-derived stem cells differentiate into either mature cells of the immune system (“B” cells) or into precursors of cells that migrate out of the bone marrow to mature in the thymus (“T” cells). In addition to red blood cells, platelets, and B cells, the bone marrow also produces Natural Killer cells, granulocytes, and immature thymocytes. The function of the thymus is to produce mature T cells. Immature thymocytes, also known as prothymocytes, leave the bone marrow and migrate into the thymus where they mature and are then released into the bloodstream.

[0006] The immune system complex also includes secondary lymphoid organs, e.g., the spleen, the lymph nodes, etc., as well as a circulatory system that is separate from blood vessels. The spleen, made up of B cells, T cells, macrophages, dendritic cells, Natural Killer cells, and red blood cells, is an immunologic filter of the blood. In addition to capturing antigens from the blood that passes through the spleen, migratory macrophages and dendritic cells bring antigens to the spleen via the bloodstream. An immune response is initiated in the spleen when macrophages or dendritic cells present the antigen to the appropriate B or T cells, and B cells become activated and produce large amounts of antibody. Lymphatic vessels and lymph nodes are the parts of a special circulatory system that carries lymph, a transparent fluid containing white blood cells, chiefly lymphocytes. Lymph bathes the tissues of the body, and is then collected in lymphatic vessels. Lymph nodes dot the network of lymphatic vessels and function as an immunologic filter for lymph when afferent lymph ducts bring lymph-containing antigens into the node. Composed mostly of T cells, B cells, dendritic cells, and macrophages, the lymph nodes drain fluid from most tissues. Antigens are filtered out of the lymph in the lymph node before the lymph is returned to the circulation. Macrophages and dendritic cells that capture antigens also present these foreign materials to T and B cells in the lymph nodes, resulting in the stimulation of B cells to develop there into antibody-secreting plasma cells. Antibodies leave the lymph node by the efferent ducts that empty into the blood stream. Lymphocytes can also leave the node by the efferent duct and travel to other sites in the lymphatic system or enter into the blood circulation. A single lymphocyte completes a circuit through the circulating blood and lymphatic systems once every 24 hours.

[0007] Tonsils, adenoids, Peyer's patches, and the appendix are also lymphoid tissues. Peyer's patches (masses of lymphocytes) are similar to the tonsils and are found throughout the body, especially in the mucous linings of the digestive and respiratory tracts. It is the function of the phagocytic cells found in Peyer's patches and other lymphatic aggregate follicles to defend the body against, for example, inadequately digested food particles crossing the gut wall and entering the blood, and to attack unwanted foreign invaders while they are still in the bowel.

[0008] The major function of B cells is the production of antibodies in response to foreign proteins of bacteria, viruses, and tumor cells. T cells are usually divided into two major groups, namely, the cytotoxic T lymphcytes (“Tc” cells or CTLs) and the helper T cells (“Th” cells or T helper cells). Th cells, also referred to as CD4+ T cells, function to augment or potentiate immune responses by the secretion of specialized factors that activate other white blood cells to fight off infection. They enhance the production of antibodies by B cells. Tc cells, also called CD8+ T cells, can directly kill certain tumor cells, viral-infected cells, and sometimes parasites. Tc cells are also important in down-regulation of immune responses. Both types of T cells often depend on the secondary lymphoid organs (the lymph nodes and spleen) as sites where activation occurs, but they are also found in other tissues of the body, including the liver, lung, blood, and intestinal and reproductive tracts.

[0009] Natural Killer cells, often referred to as NK cells, represent another type of lymphocyte and are similar to the Tc cell subset. They function as effector cells that directly kill certain tumors such as melanomas and lymphomas, and viral-infected cells. They are called “natural” killers because, unlike cytotoxic T cells, they do not need to recognize a specific antigen before carrying out their function. While NK cells, unlike the Tc cells, kill their targets without prior activation in the lymphoid organs, NK cells activated by Th cell secretions will kill tumor or viral-infected targets more effectively. NK cells target tumor cells and protect against a wide variety of infectious microbes. In several immunodeficiency diseases, including AIDS, Natural Killer cell function is abnormal. Natural Killer cells may also contribute to immunoregulation by secreting high levels of influential lymphokines. Some NK cells have surface receptors (FcγRIII, also called CD16) for the Fc portion of the IgG antibody. They bind to target cells through receptors for the Fc portion of an antibody that has reacted with antigen on a target cell. This type of cell-mediated immunity is called antibody-dependent cell-mediated cytotoxicity (ADCC). NK cells may also have receptors for the C3 component of complement, another immune defense system, and therefore recognize cells that are coated with C3 as targets. ADCC is thought to be an important defense against a variety of parasitic infections caused, for example, by protozoa and helminths.

[0010] Although small lymphocytes look identical, they can be distinguished by molecules carried on their cell surface. Not only do such markers distinguish between B cells and T cells, they distinguish among various subsets of cells that behave differently. Every mature T cell, for instance, carries a marker known as T3 (or CD3). In addition, most helper T cells carry a T4 (CD4) marker, a molecule that recognizes Class II major histocompatibility complex (“MHC”) antigens. A molecule known as T8 (CD8), which recognizes Class I MHC antigens, is found on many suppressor/cytotoxic T cells.

[0011] Another group of white blood cells collectively referred to as granulocytes, or polymorphonuclear leukocytes (PMNs), is composed of three cell types. These cells, neutrophils, eosinophils, and basophils are important in the removal of bacteria and parasites from the body. Neutrophils migrate through capillary walls and into infected tissue where they kill invaders (e.g., bacteria) and then engulf the remnants by phagocytosis. Eosinophils are cytotoxic, releasing the contents of their granules on an invader. Basophils leave the blood and accumulate at the site of an infection or other inflammation and discharge the contents of their granules, releasing a variety of mediators such as histamine, serotonin, prostaglandins and leukotrienes that, for example, increase blood flow to the area. Mediators released by basophils also play an important part in some allergic responses such as hay fever and anaphylactic responses to insect stings.

[0012] Monocytes are large phagocytic white blood cells released from the bone marrow into the blood circulation. When a monocyte enters tissue, it develops into a macrophage. Macrophages are also large, phagocytic cells that engulf foreign material (antigens) that enter the body, as well as dead and dying cells of the body. Macrophages are important in the regulation of immune responses, and are often referred to as scavengers, or antigen-presenting cells (APCs) because they pick up and ingest foreign materials and present these antigens to other cells of the immune system such as T cells and B cells. This is one of the important first steps in the initiation of an immune response. Stimulated macrophages exhibit increased levels of phagocytosis and also secrete Interleukin-1 (IL-1), a product that helps to activate B cells and T cells.

[0013] Dendritic cells also originate in the bone marrow and function as APCs. They are usually found in the structural compartment of lymphoid organs such as the thymus, lymph nodes and spleen, but are also found in the bloodstream and other tissues. It is believed that dendritic cells capture antigen or bring it to the lymphoid organs where an immune response is initiated.

[0014] Important features of the immunological system relevant to host defense and/or immunity to pathogenic microorganisms include specificity, memory, and tolerance. It is understood, for example, that an antibody or reactive T cell will react specifically with the antigen that induced its formation; it will not react with other antigens. Generally, this specificity is of the same order as that of enzyme-substrate specificity or receptor-ligand specificity, although cross-reactivity is possible. The specificity of the immune response is explained by clonal selection. During the primary immune response, a specific antigen selects a pre-existing clone of specific lymphocytes and stimulates its activation, proliferation and differentiation. It is also understood that once the immune system has responded to produce a specific type of antibody or reactive T cell, it is capable of producing more of the antibody or activated T cell more rapidly and in larger amounts; this is called the secondary (or memory) response. It is also recognized that an animal generally does not undergo an immunological response to its own (potentially-antigenic) components. The animal is said to be tolerant, or unable to react to its own potentially antigenic components. This ensures that under normal conditions, an immune response to “self” antigens (called an autoimmune response) does not occur. Tolerance is brought about in a number of ways, but in essence the immune system is able to distinguish “self” components from “non-self” (foreign) antigens; it will respond to “non-self” but not to “self”. Sometimes in an animal, tolerance can be “broken”, which may result in an autoimmune disease.

[0015] The biological activities of the antibody-mediated and cell-mediated immune responses are different and vary from one type of infection to another. There are several classes or types of antibodies (and subclasses of various types) involved in antibody-mediated immunity. All of the classes of antibodies that are produced in response to a specific antigen react stereochemically with that antigen and not with other (different) antigens. The host has the genetic capacity to produce specific antibodies to thousands of different antigens, but does not do so until there is an appropriate (specific) antigenic stimulus. Due to clonal selection, the host produces only the homologous antibodies that will react with that antigen which, as noted above, are found in blood (plasma), lymph, and many extravascular tissues. Once the antibody-mediated immunity response occurs following interaction of B lymphocytes with antigen and their differentiation into antibody-secreting plasma cells, the secreted antibody binds to the antigen which, in turn, results in its neutralization or elimination from the body.

[0016] Cell-mediated immunity, on the other hand, is mediated by specific subpopulations of T-lymphocytes called effector T cells that exist in precursor form as “resting T cells” (pT cells). These cells bear receptors for specific antigens and recognize these antigens on the surfaces of other cells. Stimulation with that antigen results in T cell activation. T cells enlarge, enter into a mitotic cycle, reproduce and develop into effector T cells whose activities are responsible for this type of immunity. They also develop into clones of identical reactive T cells called memory T cells. As noted above, most of the T cells in the body belong to one of two subsets and are distinguished by the presence on their surface of one or the other of two glycoproteins designated CD4 and CD8. Which of these molecules is present determines the types of cells to which the T cell can bind. T cells bearing CD8 (CD8+ T cells) always recognize antigen in association with Class I MHC proteins and typically function as cytotoxic T cells. Almost all the cells of the body express Class I MHC molecules. T cells bearing CD4 (CD4+ T cells) always recognize antigens in association with Class II MHC proteins on the surfaces of other cells. Only specialized antigen-presenting cells express Class II MHC molecules, including dendritic cells, phagocytic cells such as macrophages, and B cells. CD4+ T lymphocytes generally function as T helper cells.

[0017] T helper cells, which include Th1 cells and Th2 cells, respond to antigen with the production of lymphokines. Th1 and Th2 cells can be distinguished based on their lymphokine profiles. Like all T cells, Th cells arise in the thymus. When they are presented with an antigen by antigen-presenting dendritic cells they begin to proliferate and become activated. There are two kinds of dendritic cell, DC1 cells (descended from monocytes) and DC2 cells (which appear to be derived from lymphocytes).

[0018] Th1 cells (inflammatory Th1 cells involved in the elimination of pathogens residing intracellularly in vesicular compartments) are produced when DC1-type dendritic cells present antigen to the T cell receptor for antigen (TCR) and secrete Interleukin 12 (IL-12). This paracrine stimulation activates Th1 cells to secrete their own lymphokines, in particular, Tumor-Necrosis Factor-beta (TNF-β) (also known as lymphotoxin) and Interferon-gamma (IFN-γ). These lymphokines stimulate macrophages to kill bacteria they have engulfed by phagocytosis and they recruit other leukocytes to the site producing inflammation. Th1 cells are essential for cell-mediated immunity and for controlling intracellular pathogens such as, for example, Listeria and Mycobacterium tuberculosis.

[0019] Th2 cells (“true” helper Th2 cells, which are required for antibody production by B cells) are produced when DC2-type dendritic cells present antigen to the T cell receptor for antigen and, presumably, one or more paracrine stimulants. The major lymphokines secreted by Th2 cells are Interleukin 4 (IL-4), which stimulates class-switching in B cells and promotes their synthesis of IgE antibodies, acts as a positive-feedback device promoting more pre-Th cells to enter the Th2 pathway, and blocks expression of the IL-12 receptor thereby inhibiting pre-Th cells in the thymus from entering the Th1 pathway. IL-4 also causes B cells to proliferate and differentiate into antibody-secreting plasma cells and memory B cells. IL-4 activates only B cells in the vicinity which themselves have bound the antigen, and not others, so as to sustain the specificity of the immune response. Th2 cells also produce Interleukin 5 (IL-5, which attracts and activates eosinophils), Interleukin 10 (IL-10, which inhibits IL-12 production by DCs and prevents maturation of pre-Th cells to Th1 cells), and Interleukin 13 (IL-13, which also promotes the synthesis of IgE antibodies).

[0020] Activation of the Th2 cell also causes it to begin to produce Interleukin 2 (IL-2), and to express a membrane receptor for IL-2. The secreted IL-2 autostimulates proliferation of Th2 cells. For example, IL-2 binds IL-2 receptors on other T cells (which have bound the antigen) and stimulates their proliferation. In addition IL-2, stimulated Th2 cells also produce IFN-γ and Interleukin 6 (IL-6), which mediate various aspects of the immune response. IFN-0 activates Natural Killer cells to their full cytolytic potential, and is an activator of macrophages and thus increases their antitumor activities. If the macrophages are infected by intracellular parasites, it activates macrophages which in turn destroy the parasites. IFN-□ also reinforces the antitumor activities of the cytotoxic lymphocytes, increases the nonspecific activities of NK-cells, and is one of the factors that controls the differentiation of B cells and increases the secretion of immunoglobins. IL-6 stimulates several types of leukocytes, as well as the production of Acute Phase Proteins in the liver. It is particularly important in inducing B cells to differentiate into antibody forming (plasma) cells. Thus, Th2 cells provide help for B cells and are essential for antibody-mediated immunity.

[0021] Cytotoxic T lymphocytes are able to kill cells that show a new or foreign antigen on their surface (for example, virus-infected cells, or tumor cells, or transplanted tissue cells). The CD8⁺ CTLs also come in two subsets: Tc1 that, like Th1 cells, secrete IFN-γ, and Tc2 that, like Th2 cells, secrete IL-4.

[0022] The cell-mediated immunity response also plays a role in destruction of tumor cells and in rejection of tissue transplants in animals. A major problem in tissue transplantation is rejection, which is often based on cell-mediated immunity response to “foreign” cells (because they are not a perfect antigenic match). Because tumor cells contain specific antigens not seen on normal cells they also may be recognized as foreign and destroyed by the forces of cell-mediated immunity. If tumor cells develop on a regular basis in animals, it may be cell-mediated immunity that eliminates them or holds them in check. The increase in the incidence of many types of cancer (tumors) in humans with advancement of age may be correlated with a decline in the peak efficiency of the immune system that occurs about 25 years of age.

[0023] A summary of the types of cells involved in the expression of cell-mediated immunity follows. Tc lymphocytes kill cells bearing foreign antigen on surface in association with Class I MHC and can kill cells that are harboring intracellular parasites (either bacteria or viruses) as long as the infected cell is displaying a microbial antigen on its surface. Tc cells kill tumor cells and account for rejection of transplanted cells. Tc cells recognize antigen-Class I MHC complexes on target cells, contact them, and release the contents of granules directly into the target cell membrane which lyses the cell. Th lymphocytes produce lymphokines that are “helper” factors for development of B cells into antibody-secreting plasma cells. They also produce certain lymphokines that stimulate the differentiation of effector T lymphocytes and the activity of macrophages. Th1 cells recognize antigen on macrophages in association with Class II MHC and become activated (by IL-1) to produce lymphokines including IFN-γ that activates macrophages and NK cells. These cells mediate various aspects of the cell-mediated immunity response including delayed-type hypersensitivity reactions. Th2 cells recognize antigen in association with Class II MHC on an APC and then produce interleukins and other substances that stimulate specific B cell and T cell proliferation and activity. Macrophages are important as antigen-presenting cells that initiate T cell interactions, development, and proliferation. Macrophages are also involved in expression of cell-mediated immunity because they become activated by IFN-γ produced in a cell-mediated immunity response. Activated macrophages have increased phagocytic potential and release soluble substances that cause inflammation and destroy many bacteria and other cells. Natural Killer cells are cytotoxic cells that lyse cells bearing new antigen regardless of their MHC type and even lyse some cells that bear no MHC proteins. NK cells are defined by their ability to kill cells displaying a foreign antigen (e.g., tumor cells) regardless of MHC type and regardless of previous sensitization (exposure) to the antigen. NK cells can be activated by IL-2 and IFN-γ, and lyse cells in the same manner as cytotoxic T lymphocytes. Some NK cells have receptors for the Fc domain of the IgG antibody and are thus able to bind to the Fc portion of IgG on the surface of a target cell and release cytolytic components that kill the target cell via antibody-dependent cell-mediated cytotoxicity.

[0024] Extracellular factors that affect cell proliferation and differentiation have been defined as cytokines. These include the lymphokines, which are proteins produced by T-lymphocytes that have effects on the differentiation, proliferation, and activity of various cells involved in the expression of cell-mediated immunity. In general, lymphokines function by (1) focusing circulating leukocytes and lymphocytes into the site of immunological encounter; (2) stimulating the development and proliferation of B cells and T cells; (3) stimulating and preparing macrophages for their phagocytic tasks; (4) stimulating Natural Killer cells; and (5) providing antiviral cover and activity. A summary of various important lymphokines follows. Initially referred to as lymphocyte activation factor, IL-1 is mainly a product of macrophages, and has a variety of effects on various types of cells. It acts as a growth regulator of T cells and B cells, and it induces other cells such as hepatocytes to produce proteins relevant to host defense. IL-1 forms a chemotactic gradient for neutrophils and serves as an endogenous pyrogen which produces fever. Thus, IL-1 plays an important role in both the immune responses and in the inflammatory response. IL-2 stimulates the proliferation of T cells and activates NK cells. IL-3 regulates the proliferation of stem cells and the differentiation of mast cells. IL-4 causes B cell proliferation and enhanced antibody synthesis. IL-6 (also referred to as Interferon-beta2, hybridoma growth factor, B-cell differentiation factor, and hepatocyte stimulatory factor) has effects on B cell differentiation and on antibody production and on T cell activation, growth, and differentiation, and probably has a major role in the mediation of the inflammatory and immune responses initiated by infection or injury. IL-8 is a chemotactic attractant for neutrophils. IL-13 shares many of the properties of IL-4, and is a potent regulator of inflammatory and immune responses. IFN-γ is produced by T cells and may be considered a lymphokine. It is sometimes called “immune interferon” (Interferon-alpha being referred to as “leukocyte interferon” and Interferon-beta being referred to as “fibroblast interferon”). IFN-γ has several antiviral effects including inhibition of viral protein synthesis in infected cells. It also activates macrophages and NK cells, and stimulates IL-1, IL-2, and antibody production. Lymphotoxins include the Tumor Necrosis Factors. TNF-beta is produced by T cells, while TNF-alpha is produced by T cells as well as other types of cells. TNFs function to kill cells, including tumor cells (at a distance). There are several Colony Stimulating Factors (CSFs), including granulocyte macrophage colony stimulating factor (GMCSF), which cause phagocytic white cells of all types to differentiate and divide.

[0025] The nature of the membrane receptors for antigen on B cells and T cells is fairly well understood. Each B cell has approximately 10⁵ membrane-bound antibody molecules (IgD or IgM) that correspond in specificity to the antibody the cell is programmed to produce (these receptors being referred to as BCRs). CD32 (FcγRII) on B cells are receptors for the Fc region of IgG. CD21 and CD35 on B cells are receptors for complement components. Each T cell has about 10⁵ molecules of a specific antigen-binding T cell receptor (a TCR) exposed on its surface. The TCR is similar, but not identical, to an antibody. There are two types of T cells that differ in their TCRs, alpha/beta (αβ) T cells and gamma/delta (γδ) T cells. The TCR of alpha/beta T cells binds a bimolecular complex displayed by a Class I MHC molecule at the surface of an antigen-presenting cell. As noted above, most Th cells express CD4, whereas most Tc cells express CD8.

[0026] Both BCRs and TCRs are similar in that they are integral membrane proteins, they are present in thousands of identical copies exposed at the cell surface, they are made before the cell ever encounters an antigen, they are encoded by genes assembled by the recombination of segments of DNA, they have a unique binding site that binds through non-covalent forces to a portion of the antigen called an epitope (or antigenic determinant) that depends on complementarity of the surface of the receptor and the surface of the epitope, and successful binding of the antigen receptor to the epitope, if accompanied by additional signals, results in stimulation of the cell to leave Go and enter the cell cycle and repeated mitosis that leads to the development of a clone of cells bearing the same antigen receptor, i.e., a clone of cells of the identical specificity. BCRs and TCRs differ in their structure, the genes that encode them, and the type of epitope to which they bind.

[0027] Induction of a primary immune response begins when an antigen penetrates epithelial surfaces. It will eventually come into contact with macrophages or certain other classes of antigen presenting cells, including B cells, monocytes, dendritic cells, Langerhans cells, and endothelial cells. Antigens, such as bacterial cells, are internalized by endocytosis and “processed” by APCs, then “presented” to immunocompetent lymphocytes to initiate the early steps of the immunological response. Processing by a macrophage (for example) results in attaching antigenic materials to the surface of the membrane in association with Class II MHC molecules on the surface of the cell. The antigen-class II MHC complex is presented to a T-helper (Th2) cell which is able to recognize processed antigen associated with a Class II MHC molecule on the membrane of the macrophage. This interaction, together with stimulation by IL-1 from secreted by the macrophage, will activate the Th2 cell.

[0028] As indicated above, B cells themselves behave as APCs. Cross-linked antigens bound to antibody receptors on the surface of a B cell cause internalization of some of the antigen and expression on the B cell membrane together with Class II MHC molecules. The Th2 cell recognizes the antigen together with the Class II MHC molecules, and secretes the various lymphokines that activate the B cells to become antibody-secreting plasma cells and memory B cells. Even if the antigen cannot cross-link the receptor, it may be endocytosed by the B cell, processed, and returned to the surface in association with Class II MHC where it can be recognized by specific Th2 cells which will become activated to initiate B cell differentiation and proliferation. In any case, the overall B cell response leads to antibody-mediated immunity.

[0029] The antigen receptors on B cell surfaces are thought to be the specific types of antibodies that they are genetically-programmed to produce. Hence, there are thousands of sub-populations of B cells distinguished by their ability to produce a unique antibody molecule. B cells can also react with a homologous antigen on the surface of the macrophage, or with soluble antigens. When a B cell is bound to antigen, and simultaneously is stimulated by IL-4 produced by a nearby Th2 cell, the B cell is stimulated to grow and divide to form a clone of identical B cells, each capable of producing identical antibody molecules. The activated B cells further differentiate into plasma cells which synthesize and secrete large amounts of antibody, and into memory B cells. The antibodies produced and secreted by the plasma cells will react specifically with the homologous antigen that induced their formation. Many of these reactions lead to host defense and to prevention of reinfection by pathogens. Memory cells play a role in secondary immune responses. Plasma cells are relatively short-lived (about one week) but produce large amounts of antibody during this period. Memory cells, on the other hand, are relatively long-lived and upon subsequent exposure to antigen they become quickly transformed into antibody-producing plasma cells.

[0030] Generation of cell mediated immunity begins when, for example, a cytotoxic T cell recognizes a processed antigen associated with Class I MHC on the membrane of a cell (usually an altered self cell, but possibly a transplanted tissue cell, or a eukaryotic parasite). Under stimulation by IL-2 produced by Th2 cells, the Tc cell becomes activated to become a cytotoxic T lymphocyte capable of lysing the cell which is showing the new foreign antigen on its surface, a primary manifestation of cell-mediated immunity. The interaction between an antigen-presenting macrophage and a Th cell stimulates the macrophage to produce and secrete a Interleukin-1 that acts locally on the Th cell, stimulating the Th-cell to differentiate and produce its own cytokines (which may here be called lymphokines because they arise from a lymphocyte). These lymphokines have various functions. IL-4 has an immediate effect on nearby B cells. IL-2 has an immediate effect on T cells as described above.

[0031] Leucocytes also express adhesion promoting receptors that mediate cell-cell and cell-matrix interactions. These adhesive interactions are crucial to the regulation of haemopoiesis and thymocyte maturation, the direction and control of leucocyte traffic and migration through tissues, and the development of immune and non-immune inflammatory responses. Several families of adhesion receptors have been identified. The leucocyte integrin family comprises three alpha-beta heterodimeric membrane glycoproteins that share a common beta subunit, designated CD18. The alpha subunits of each of the three members, lymphocyte function associated antigen-1 (LFA-1), macrophage antigen-1 (Mac-1) and p150,95 are designated CD11a, b, and c respectively. These adhesion molecules play a critical part in the immune and inflammatory responses of leucocytes. The leucocyte integrin family is, in turn, part of the integrin superfamily, members of which are evolutionally, structurally and functionally related. Another Integrin subfamily found on leucocytes is the VLA group, so-called because the “very late activation antigens” VLA-1 and VLA-2 were originally found to appear late in T-cell activation. Members of this family function mainly as extracellular matrix adhesion receptors and are found both on haemopoietic and non-haemopoietic cells. They play a part in diverse cellular functions including tissue organisation, lymphocyte recirculation and T-cell immune responses. Another integrin subfamily, the cytoadhesins, are receptors on platelets and endothelial cells that bind extracellular matrix proteins. A second family of adhesion receptors is the immunoglobulin superfamily, members of which include CD2, LFA-3, and ICAM-1, which participate in T-cell adhesive interactions, and the antigen-specific receptors of T and B cells, CD4, CD8, and the MHC Class I and II molecules. Another recognized family of adhesion receptors is the selectins, characterized by a common lectin domain. Leucocyte adhesion molecule-1 (LAM-1), which is the human homologue of the murine homing receptor, MEL-14, is expressed on leucocytes, while endothelial leucocyte adhesion molecule-1 (ELAM-1) and granule membrane protein (GMP-140) are expressed on stimulated endothelial cells and activated platelets.

[0032] Activation of an immune response requires physical cell-cell contact in addition to cytokines. Thus, for example, development of B and T cell precursors require intimate contact with stromal cells. At least three critical cell-cell contact events are required for the generation of immune responses. The first is initial contact of a specific antigen with a naive T cell. Because of the requirement for MHC presentation, this is an obligate cell contact event. In normal situations the critical antigen presenting cell is the dendritic cell. In addition to the MHC/peptide-TCR interaction there are other non-antigen specific membrane bound ligand-receptor pairs which are important for the dendritic cell-T cell interaction. The principal one is the association of the CD28 molecule on the T cell with either of two ligands, B7.1 (CD80) and B7.2 (CD86), on the dendritic cell. These molecules are termed accessory molecules and it is understood that the CD28 molecule delivers an essential second signal to the T cell without which the T cell does not become activated.

[0033] A second essential cell-cell contact is between the activated T cell and an antigen-specific B cell. Most antigens are T cell-dependent, that is, an antibody response to the antigen absolutely requires T cell help. This help is delivered both by cytokines and by cell-cell contact. Cells bind specific antigen via surface Ig, then internalize, process, and present it on Class II MHC molecules. This enables them to be recognized by T cells specific for helper epitopes from the specific antigen. This cell-cell interaction also requires CD28 binding to B7 on the B cell. In addition, a molecule called CD40 ligand or CD154, the expression of which is induced upon T cell activation, binds to CD40 on B cells. CD40 crosslinking promotes B cell proliferation, prevents apoptosis of germinal-center B cells, and promotes immunoglobulin isotype switching. The CD28-B7 and CD40-CD40L receptor ligand interactions are both essential for the dialogue between B and T cells that causes their mutual activation.

[0034] A third cell-cell interaction that is essential in immune responses is the binding of activated B cells (which have migrated into a specialised structure in lymphoid organs called germinal centers) to follicular dendritic cells (FDCs). FDCs are specialized stromal cells that hold intact, i.e., unprocessed, antigen on their surface in the form of long-lived immune complexes. Among other molecules, FDCs express CD23, which binds to germinal center B cells via a CR2 receptor and stimulates differentiation to plasma cells. Time is required before a primary immune response is effective as a host defense. Antigens have to be recognized, taken up, digested, processed, and presented by APCs. A few select Th cells must react with antigen and respond; preexisting B or T lymphocytes must encounter the antigen and proliferate and differentiate into effector cells (plasma cells or Tc cells). In the case of antibody-mediated immunity, antibody level has to build up to an effective physiological concentration to render its host resistant. It may take several days or weeks to reach a level of effective immunity, even though this immunity may persist for many months, or years, or even a lifetime, due to the presence of the antibodies. In natural infections, the inoculum is small, and even though the antigenic stimulus increases during microbial replication, only small amounts of antibody are formed within the first few days, and circulating antibody is not detectable until about a week after infection.

[0035] With regard to induction of a secondary immune response, it is understood that on re-exposure to microbial antigens (secondary exposure to antigen), there is an accelerated immunological response, i.e., the secondary or memory response. Larger amounts of antibodies are formed in only 1-2 days. This is due to the activities of specific memory B cells or memory T cells which were formed during the primary immune response. These memory cells, when stimulated by homologous antigen, “remember” having previously seen the antigen, and are able to rapidly divide and differentiate into effector cells. Stimulating memory cells to rapidly produce very high (effective) levels of persistent circulating antibodies is the basis for giving “booster”-type vaccinations to humans and pets. Thus, following the first exposure to an antigen the immune response (as evidenced by following the concentration of specific antibody in the serum) develops gradually over a period of days, reaches a low plateau within 2-3 weeks, and usually begins to decline in a relatively short period of time. When the antigen is encountered a second time, a secondary (memory) response causes a rapid rise in the concentration of antibody, reaching a much higher level in the serum, which may persist for a relatively long period of time. This is not to say that a protective level of antibody may not be reached by primary exposure alone, but usually to ensure a high level of protective antibody that persists over a long period of time, it is necessary to have repeated antigenic stimulation of the immune system.

[0036] An immunoglobulin molecule (abbreviated Ig), is a multimeric protein composed of two identical light chain polypeptides and two identical heavy chain polypeptides (H₂L₂) that are joined into a macromolecular complex by interchain disulfide bonds, i.e., covalent bonds between the sulfhydryl groups of neighboring cysteine residues. There are various classes of human antibody proteins, each of which is produced by a specific clone of plasma cells. Five human immunoglobulin classes are defined on the basis of their heavy chain composition, and are named IgG, IgM, IgA, IgE, and IgD. The IgG-class and IgA-class antibodies are further divided into subclasses, namely, IgG1, IgG2, IgG3, and IgG4, and IgA1 and IgA2. Intrachain disulfide bonds join different areas of the same polypeptide chain, which results in the formation of loops that, along with adjacent amino acids, constitute the immunoglobulin domains. At the amino-terminal portion (also called the “NE₂-terminus” or the “N-terminus”), each light chain and each heavy chain has a single variable region that shows considerable variation in amino acid composition from one antibody to another. The light chain variable region, V_{L}, associates with the variable region of a heavy chain, V_{H}, to form the antigen binding site of the immunoglobulin, called the F_{V}.

[0037] In addition to variable regions, each of the antibody chains have one or more constant regions. Light chains have a single constant region domain. Thus, light chains have one variable region and one constant region. Heavy chains have several constant region domains. The heavy chains in IgG, IgA, and IgD antibodies have three constant region domains, which are designated CH1, CH2, and CH3, and the heavy chains in IgM and IgE antibodies have four constant region domains, CH1, CH2, CH3 and CH4. Thus, heavy chains have one variable region and three or four constant regions. Immunoglobulin structure and function are reviewed, for example, in Harlow et al., Eds., Antibodies: A Laboratory Manual, Chapter 14, Cold Spring Harbor Laboratory, Cold Spring Harbor (1988).

[0038] The heavy chains of immunoglobulins can also be divided into three functional regions: the Fd region (a fragment comprising V_{H} and CH1, i.e., the two N-terminal domains of the heavy chain), the hinge region, and the Fc region (the “fragment crystallizable” region, derived from constant regions and formed after pepsin digestion). The Fd region in combination with the light chain forms an Fab (the “fragment antigen-binding”). Because an antigen will react stereochemically with the antigen-binding region at the amino terminus of each Fab the IgG molecule is divalent, i.e., it can bind to two antigen molecules. The Fc contains the domains that interact with immunoglobulin receptors on cells and with the initial elements of the complement cascade. Thus, the Fc fragment is generally considered responsible for the effector functions of an immunoglobulin, such as complement fixation and binding to Fc receptors. Pepsin sometimes also cleaves before the third constant domain (CH3) of the heavy chain to give a large fragment F(abc) and a small fragment pFcb. These terms are also used for analogous regions of the other immunoglobulins. The hinge region, found in IgG, IgA, and IgD class antibodies, acts as a flexible spacer, allowing the Fab portion to move freely in space. In contrast to the constant regions, the hinge domains are structurally diverse, varying in both sequence and length among immunoglobulin classes and subclasses.

[0039] For example, the length and flexibility of the hinge region varies among the IgG subclasses. The hinge region of IgG1 encompasses amino acids 216-231 and because it is freely flexible, the Fab fragments can rotate about their axes of symmetry and move within a sphere centered at the first of two inter-heavy chain disulfide bridges. IgG2 has a shorter hinge than IgG1, with 12 amino acid residues and four disulfide bridges. The hinge region of IgG2 lacks a glycine residue, it is relatively short and contains a rigid poly-proline double helix, stabilised by extra inter-heavy chain disulfide bridges. These properties restrict the flexibility of the IgG2 molecule. IgG3 differs from the other subclasses by its unique extended hinge region (about four times as long as the IgG1 hinge), containing 62 amino acids (including 21 prolines and 11 cysteines), forming an inflexible poly-proline double helix. In IgG3 the Fab fragments are relatively far away from the Fc fragment, giving the molecule a greater flexibility, The elongated hinge in IgG3 is also responsible for its higher molecular weight compared to the other subclasses. The hinge region of IgG4 is shorter than that of IgG1 and its flexibility is intermediate between that of IgG1 and IgG2. The flexibility of the hinge region reportedly decreases in the order IgG3>IgG1>IgG4>IgG2. The four IgG subclasses also differ from each other with respect to their effector functions. This difference is related to differences in structure, including with respect to the interaction between the variable region, Fab fragments, and the constant Fc fragment. Nevertheless, aside from glycosylation within the CH2 region, for example, in spite of this knowledge there are no set rules or conventions regarding means or methods to change features, including sequences, of these subclasses of molecule to change, control, add, or remove different functions, for example, ADCC, CDC, and other functions.

[0040] According to crystallographic studies, the immunoglobulin hinge region can be further subdivided functionally into three regions: the upper hinge region, the core region, and the lower hinge region. Shin et al., 1992 Immunological Reviews 130: 87. The upper hinge region includes amino acids from the carboxyl end of CH1 to the first residue in the hinge that restricts motion, generally the first cysteine residue that forms an interchain disulfide bond between the two heavy chains. The length of the upper hinge region correlates with the segmental flexibility of the antibody. The core hinge region contains the inter-heavy chain disulfide bridges, and the lower hinge region joins the amino terminal end of the CH2 domain and includes residues in CH2. Id. The core hinge region of human IgG1 contains the sequence Cys-Pro-Pro-Cys which, when dimerized by disulfide bond formation, results in a cyclic octapeptide believed to act as a pivot, thus conferring flexibility. The hinge region may also contain one or more glycosylation sites, which include a number of structurally distinct types of sites for carbohydrate attachment. For example, IgA1 contains five glycosylation sites within a 17 amino acid segment of the hinge region, conferring resistance of the hinge region polypeptide to intestinal proteases, considered an advantageous property for a secretory immunoglobulin.

[0041] Conformational changes permitted by the structure and flexibility of the immunoglobulin hinge region polypeptide sequence may also affect the effector functions of the Fc portion of the antibody. Three general categories of effector functions associated with the Fc region include (1) activation of the classical complement cascade, (2) interaction with effector cells, and (3) compartmentalization of immunoglobulins. The different human IgG subclasses vary in the relative efficacies with which they fix complement, or activate and amplify the steps of the complement cascade. See, e.g., Kirschfink, 2001 Immunol. Rev. 180: 177; Chakraborti et al., 2000 Cell Signal 12: 607; Kohl et al., 1999 Mol. Immunol. 36: 893; Marsh et al., 1999 Curr. Opin. Nephrol. Hypertens. 8: 557; Speth et al., 1999 Wien Klin. Wochenschr. 111: 378.

[0042] Complement-dependent cytotoxicity (CDC) is believed to be a significant mechanism for clearance of specific target cells such as tumor cells. CDC is a stream of events that consists of a series of enzymes that become activated by each other in a cascade fashion. Complement has an important role in clearing antigen, accomplished by its four major functions: (1) local vasodilation; (2) attraction of immune cells, especially phagocytes (chemotaxis); (3) tagging of foreign organisms for phagocytosis (opsonization); and (4) destruction of invading organisms by the membrane attack complex (MAC attack). The central molecule is the C3 protein. It is an enzyme that is split into two fragments by components of either the classical pathway or the alternative pathway. The classical pathway is induced by antibodies, especially IgG and IgM, while the alternative pathway is nonspecifically stimulated by bacterial products like lipopolysaccharide (LPS). Briefly, the products of the C3 split include a small peptide C3a which is chemotactic for phagocytic immune cells and results in local vasodilation by causing the release of C5a fragment from C5. The other part of C3, C3b coats antigens on the surface of foreign organisms and acts to opsonize the organism for destruction. C3b also reacts with other components of the complement system to form an MAC consisting of C5b, C6, C7, C8 and C9.

[0043] In general, IgG1 and IgG3 most effectively fix complement, IgG2 is less effective, and IgG4 does not activate complement. Complement activation is initiated by binding of C1q, a subunit of the first component C1 in the cascade, to an antigen-antibody complex. Even though the binding site for C1q is located in the CH2 domain of the antibody, the hinge region influences the ability of the antibody to activate the cascade. For example, recombinant immunoglobulins lacking a hinge region are unable to activate complement. Shin et al., 1992. Without the flexibility conferred by the hinge region, the Fab portion of the antibody bound to the antigen may not be able to adopt the conformation required to permit C1q to bind to CH2. See id. Hinge length and segmental flexibility have been reported to correlate with complement activation; however, the correlation is not absolute. Human IgG3 molecules with altered hinge regions that are as rigid as IgG4, for example, can still effectively activate the cascade.

[0044] The absence of a hinge region, or a lack of a functional hinge region, can also affect the ability of certain human IgG immunoglobulins to bind Fc receptors on immune effector cells. Binding of an immunoglobulin to an Fc receptor facilitates antibody-dependent cell-mediated cytotoxicity, which as noted above is presumed to be an important mechanism for the elimination of tumor cells. The human IgG Fc receptor (FcR) family is divided into three groups, FcγRI (CD64), which is capable of binding IgG with high affinity, and FcγRII (CD32) and FcγRIII (CD16), both of which are lower affinity receptors. The molecular interaction between each of the three receptors and an immunoglobulin has not been defined precisely, but experimental evidence indicates that residues in the hinge proximal region of the CH2 domain may be important to the specificity of the interaction between the antibody and the Fc receptor. IgG1 myeloma proteins and recombinant IgG3 chimeric antibodies that lack a hinge region are reportedly unable to bind FcγRI, perhaps because accessibility to CH2 is decreased. Shin et al., 1993 Intern. Rev. Immunol. 10: 177, 178-79.

[0045] Unusual and apparently evolutionarily unrelated exceptions to the H₂L₂ structure of conventional antibodies occur in some isotypes of the immunoglobulins found in camelids (camels, dromedaries and llamas; Hamers-Casterman et al., 1993 Nature 363: 446; Nguyen et al., 1998 J. Mol. Biol. 275: 413), nurse sharks (Roux et al., 1998 Proc. Nat. Acad. Sci. USA 95: 11804), and in the spotted ratfish (Nguyen, et al., “Heavy-chain antibodies in Camelidae; a case of evolutionary innovation,” 2002 Immunogenetics 54(1): 39-47). These antibodies can apparently form antigen-binding regions using only heavy chain variable region, i.e., these functional antibodies are homodimers of heavy chains only (referred to as “heavy-chain antibodies” or “HCAbs”). In both species, these variable regions often contain an extended third complementarity determining region (CDR3) that may help compensate for the lack of a light chain variable region, and there are frequent disulfide bonds between CDR regions that presumably help to stabilize the binding site. Muyldermans et al., 1994 Prot. Engineer. 7: 1129; Roux et al., 1998. However, the precise function of the heavy chain-only “antibodies” is unknown, and the evolutionary pressure leading to their formation has not been identified. See, e.g., Nguyen, et al., 2002, supra. Camelids, including camels, llamas, and alpacas, also express conventional H₂L₂ antibodies, and the heavy chain-only antibodies thus do not appear to be present in these animals simply as an alternative antibody structure.

[0046] Variable regions (V_{H}H) of the camelid heavy chain-only immunoglobulins and conventional (H₂L₂) heavy chain variable regions contain amino acid differences, including differences at several positions that may be involved in the interface between conventional V_{H} and V_{L} domains. Nguyen et al., 1998 J. Mol. Biol 275: 413; Muyldermans et al., 1994 Prot. Engineer. 7: 1129. Camelid V_{H}H reportedly recombines with IgG2 and IgG3 constant regions that contain hinge, CH2, and CH3 domains and lack a CH1 domain. Hamers-Casterman et al., 1993 Nature 363: 446. Interestingly, V_{H}H are encoded by a chromosomal locus distinct from the V_{H} locus (Nguyen et al., 1998, supra), indicating that camelid B cells have evolved complex mechanisms of antigen recognition and differentiation. Thus, for example, llama IgG1 is a conventional (H₂L₂) antibody isotype in which V_{H} recombines with a constant region that contains hinge, CH1, CH2 and CH3 domains, whereas the llama IgG2 and IgG3 are heavy chain-only isotypes that lack CH1 domains and that contain no light chains.

[0047] The classes of immunoglobulins have different physical and chemical characteristics and they exhibit unique biological properties. Their synthesis occurs at different stages and rates during an immune response and/or during the course of an infection. Their importance and functions in host resistance (immunity) are different.

[0048] Immunoglobulin G (IgG), a protein with a molecular weight of about 150,000 daltons (150 kD), is the predominant Ig in the serum. It makes up about 80% of the total antibody found in an animal at any given time, being 75% of the total serum antibody. It can diffuse out of the blood stream into the extravascular spaces and it is the most common Ig found there. Its concentration in tissue fluids is increased during inflammation, and it is particularly effective at the neutralization of bacterial extracellular toxins and viruses. It also has opsonizing ability and complement-fixing ability. The polypeptide composition of the Fc region of all IgG1 antibody molecules is relatively constant regardless of antibody specificity; however, as noted above, the Fab regions always differ in their exact amino acid sequences depending upon their antigenic specificity. Specific amino acid regions of the Fc portion of the molecule are recognized by receptors on phagocytes and certain other cells, and the Fc domain contains a peptide region that will bind to and activate complement, which is often required for the manifestation of antibody-mediated immunity. Because the IgG molecule is divalent, it can cross-link antigen molecules, which may lead to precipitation or agglutination of antigens; if IgG is bound to antigen on a microbial cell or surface, its Fc region may provide an extrinsic ligand that will be recognized by specific receptors on phagocytes. Microbial cells or viruses coated with IgG molecules are opsonized for phagocytosis, and opsonized pathogens are taken up and destroyed much more readily by phagocytes than their non-opsonized counterparts. IgG, as well as IgM and IgA, will neutralize the activity of toxins, including bacterial exotoxins. Furthermore, cross-linked IgG molecules on the surface of a cell can bind and activate complement from the serum and set off a cascade of reactions that can lead to destruction of the cell.

[0049] IgM is the first immunoglobulin to appear in the blood stream during the course of an infection. It is mainly confined to the bloodstream and provides protection against blood-borne pathogens. IgM makes up about 10% serum immunoglobulins, and is arranged to resemble a pentamer of five immunoglobulin molecules (having a molecular weight of about 900 kD) tethered together at by their Fc domains. In addition to covalent linkages between the monomeric subunits, the pentamer is stabilized by a 1 Skd polypeptide called J chain. IgM, therefore, has a theoretical “valence” of ten (i.e., it has ten exposed Fab domains). Probably, the most important role of IgM is its ability to function early in the immune responses against blood-borne pathogens given its efficiency in agglutinating particulate antigens. IgM binds also complement strongly and IgM antibodies bound to a microbial surface act as opsonins, rendering the microbe more susceptible to phagocytosis. In the presence of complement and IgM whole microbial cells may be killed and lysed. As noted above, IgM also appears on the surfaces of mature B cells as a transmembranous monomer where it functions as an antigen receptor, capable of activating B cells when bound to antigen.

[0050] Gene rearrangement at the immunoglobulin loci during lymphoid development generates a repertoire of B lymphocytes that express a diversity of antigen receptors. The gene rearrangement, which is catalysed by the rearrangement-activating gene (“RAG”) recombinase, integrates the immunoglobulin V, D and J gene segments to yield productively rearranged immunoglobulin genes that encode the heavy and light chains of IgM antibodies. The diversity of IgM antibodies in this primary repertoire is achieved through combinatorial mechanisms (the choice of V, D and J gene segments utilized in a particular antibody), as well as junctional diversity. The joining of V, D and J gene segments is somewhat imprecise, and nucleotides may be inserted at the junction in a non-templated manner. There is therefore a very high degree of resultant diversity at the V-D-J borders. This contributes in a major way to the structural diversity of the third complementarity determining region of the antibody, a region that often plays a critical role in antigen recognition. This primary repertoire of IgM antibodies comprises a few million different structures. The size of this repertoire means that any incoming antigen is likely to encounter an antibody that recognizes it with acceptable affinity. A high- affinity binding site is unlikely to be available for most incoming antigens (the repertoire is not large enough), but the affinity of the available IgM antibodies in the primary repertoire will vary from antigen to antigen. If an epitope is re-iterated at high density on the surface of the antigen (e.g., a repeated structure on the surface of a virus or bacterium), then an IgM antibody may nevertheless be effective in mediating clearance of the organism, despite the low affinity of the individual interaction between antigenic epitope and immunoglobulin combining site. The density of the epitopes may allow multivalent interactions with IgM, leading to a high-avidity interaction, providing that a suitable spacing of antigenic epitopes can occur. Nevertheless, to ensure an effective and specific response, especially when the concentration of antigen is low (as may occur when the body is faced with a very small number of infecting viral particles), it would be preferable if high-affinity antibodies were available for neutralizing, for example, an infecting organism. The size of the primary repertoire mitigates against the likelihood of such high-affinity antibodies being present in this repertoire. The immune system therefore operates using a two-stage strategy. The primary repertoire of IgM antibodies is generated by a process of gene rearrangement and takes place prior to antigen encounter during early lymphocyte development. However, once foreign antigen has been encountered, those B cells in the primary repertoire that encode suitable (albeit low-affinity) antibodies are selectively expanded and subjected to an iterative alternation of directed hypermutation and antigen-mediated selection. This allows a significant maturation in affinity of the antigen-specific antibodies that are produced. Antigen triggering also drives isotype switch recombination. Thus, in the absence of external antigen stimulation and any maternally derived immunoglobulin, the serum will only contain a diversity of unmutated IgM molecules that have been generated by gene rearrangement. This repertoire shifts with age as a result of continuous antigen exposure, such that the majority of the serum immunoglobulin in older animals is composed of mutated IgG (and IgA) molecules whose specificities have developed as a consequence of antigen selection.

[0051] IgA exists as a H₂L₂ monomer of about 160 kD in serum and, in secretions, as a dimer of the H₂L₂ monomer of about 400 kD. As with IgM, polymerization (dimerization) is via a J-chain. IgA has two subclasses based on different heavy chains, IgA1 and IgA2. IgA1 is produced in bone marrow and makes up most of the serum IgA. Both IgA1 and IgA2 are synthesized in GALT (gut associated lymphoid tissues) to be secreted onto the mucosal surfaces. Because IgA may be synthesized locally and secreted in the seromucous secretions of the body, it is sometimes referred to as secretory antibody or sIgA. Quantitatively, IgA is synthesized in amounts greater than IgG, but it has a short half life in serum (6 days), and it is lost in secretory products. The concentration of IgA in serum is about 15% of the total antibody. Secretion of dimeric IgA is mediated by a 100 kD glycoprotein called secretory component. It is the addition of the secretory piece to IgA molecules that accounts for their ability to exit the body to mucosal surfaces via the exocrine glands. IgM can be transported similarly and makes up a small proportion of secretory antibodies. Secretory IgA is the predominant immunoglobulin present in gastrointestinal fluids, nasal secretions, saliva, tears and other mucous secretions of the body. IgA antibodies are important in resistance to infection of the mucosal surfaces of the body, particularly the respiratory, intestinal and urogenital tracts. IgA acts as a protective coating for the mucous surfaces against microbial adherence or initial colonization. It can also neutralize toxin activity on mucosal surfaces. Fc receptors for IgA-coated microorganisms found on monocytes and neutrophils derived from the respiratory mucosa suggest that IgA may have a role in the lung, at least, in opsonization of pathogens. Secretory IgA is also transferred via the milk, i.e., the colostrum, from a nursing mother to a newborn, which provides passive immunity to many pathogens, especially those that enter by way of the GI tract.

[0052] IgE is a immunoglobulin of about 190 kD that accounts for about 0.002% of the total serum immunoglobulins. It is produced by plasma cells below the respiratory and intestinal epithelia. The majority of IgE is bound to tissue cells, especially mast cells. If an infectious agent succeeds in penetrating the IgA barrier, it comes up against the next line of defense, the MALT (mucosa-associated lymphoid tissues) system which is managed by IgE. IgE is bound very firmly to specific IgE Fc receptors on mast cells. Contact with antigen leads to release of mediators of inflammation from the mast cells, which effectively recruits various agents of the immune response including complement, chemotactic factors for phagocytes, T cells, etc. Although a well-known manifestation of this reaction is a type of immediate hypersensitivity reaction called atopic allergy (e.g., hives, asthma, hay fever, etc.), the MALT responses act as a defense mechanism because they amplify the inflammatory response and may facilitate rejection of a pathogen.

[0053] IgD is a molecule of about 175 kd that resembles IgG in its monomeric form. IgD antibodies are found for the most part on the surfaces of B lymphocytes. The same cells may also carry IgM antibody. As noted above, it is thought that IgD and IgM function as mutually-interacting antigen receptors for control of B cell activation and suppression. Hence, IgD may have an immunoregulatory function.

[0054] In addition to opsonization, activation of complement, and ADCC, antibodies have other functions in host defense including steric hindrance, toxin neutralization, agglutination, and precipitation. With regard to steric hindrance, it is understood that antibodies combine with the surfaces of microorganisms and may block or prevent their attachment to susceptible cells or mucosal surfaces. Antibody against a viral component can block attachment of the virus to susceptible host cells and thereby reduce infectivity. Secretory IgA can block attachment of pathogens to mucosal surfaces. Toxin-neutralizing antibodies (antitoxins) can also react with a soluble bacterial toxin and block the interaction of the toxin with its specific target cell or substrate. Antibodies can also combine with the surfaces of microorganisms or soluble antigens and cause them to agglutinate or precipitate. This reduces the number of separate infectious units and makes them more readily phagocytosed because the clump of particles is larger in size. Floccules or aggregates of neutralized toxin may be removed by phagocytes.

[0055] Antibodies have been proposed for use in therapy. Animals, including humans and mice have the ability to make antibodies able to recognize (by binding to) virtually any antigenic determinant and to discriminate between similar epitopes. Not only does this provide the basis for protection against disease organisms, but it makes antibodies attractive candidates to target other types of molecules found in the body, such as receptors or other proteins present on the surface of normal cells and molecules present uniquely on the surface of cancer cells. Thus the remarkable specificity of antibodies makes them promising agents for human therapy.

[0056] Initial antibody preparations available for use, such as intravenous gammaglobulins, included animal and human antisera that were used in vivo to destroy bacteria (tetanus, pneumococcus) and neutralize virus (hepatitis A and B, rabies, cytomegalovirus, and varicella zoster) in the blood of infected individuals. Possibly the most important early application was the use and endotoxins. However, there are problems associated with the use of antibodies in human therapy because the response of the immune system to any antigen, even the simplest, is “polyclonal,” i.e., the system manufactures antibodies of a great range of structures both in their binding regions as well as in their effector regions. Polyclonal antibody treatment was also associated with unwanted side effects. In addition to the polyclonal nature of these antibody preparations, there was the risk of infection from contaminating viruses. Serum sickness, anaphylaxis, and were also considered limiting factors. Furthermore, even if one were to isolate a single antibody-secreting cell, and place it in culture, it would die out after a few generations because of the limited growth potential of all normal somatic cells.

[0057] Until the late 1970s, polyclonal antibodies obtained from the blood serum of immunized animals, provided the only source of antibodies for research or treatment of disease. Isolation of specific antibodies was essentially impossible until Kohler and Milstein discovered how to make “monoclonal antibodies” that would have a single specificity, that would all be alike due to manufacture by a single clone of plasma cells, and that could be grown indefinitely. This technique was described in a 1975 publication (Nature 256: 495-97), and Kohler and Milstein received the 1984 Nobel Prize in Medicine for their work.

[0058] The first step in Kohler and Milstein's technique for production of monoclonal antibodies involves immunizing an experimental animal with the antigen of interest. In most of their experiments, Kohler and Milstein injected a mouse with sheep red blood cells. The mouse's body initiates an immune response and begins producing antibodies specific to the antigen. The mouse's spleen is then removed and B cells producing the antibody of interest are isolated. Tumor-producing cells that have been grown in culture are then fused with the B lymphocytes using polyethylene glycol in order to produce a “hybridoma.” Only hybridomas resulting from the fusion will survive. The spleen lymphocyte has a limited life span, so any B cells that did not fuse with a myeloma will die in the culture. As well, those cells that lack the antibody-producing aspect of the B cell will not secrete the enzyme HGPRT, which is required for growth in the HAT medium. The hypoxathine-aminopterinthymidine (HAT) medium, on which the cells are grown, inhibits the pathway for nucleotide synthesis. Cells which produce HGPRT can bypass this pathway and continue to grow. By placing the fused cells in a HAT medium, the true hybridomas can be isolated (McKay, Raff, Reichardt 1981). The isolated hybridoma cells are then screened for specificity to the desired antigen. Because each hybridoma descends from one B cell, it makes copies of only one antibody. The hybridoma that produces the antibody of interest is grown in culture to produce large amounts of monoclonal antibodies, which are then isolated for further use. The technique is called somatic cell hybridization, and the resulting hybridoma (selected for both immortality and production of the specific antibody of interest) may be cultured indefinitely, i.e., it is a potenially immortal cell line.

[0059] Monoclonal antibodies are now widely used as diagnostic and research reagents. However, their introduction into human therapy has been much slower. One principal difficulty is that mouse antibodies are “seen” by the human immune system as foreign, and the human patient mounts an immune response against them, producing HAMA (“human anti-mouse antibodies”). These not only cause the therapeutic antibodies to be quickly eliminated from the host, but also form immune complexes that cause damage to the kidneys.

[0060] Two approaches have been used in an attempt to reduce the problem of HAMA. The first is the production of chimeric antibodies in which the antigen-binding part (variable regions) of a mouse monoclonal antibody is fused to the effector part (constant region) of a human antibody using genetic engineering. In a second approach, rodent antibodies have been altered through a technique known as complementarity determining region (CDR) grafting or “humanization.” In this process, the antigen binding sites, which are formed by three CDRs of the heavy chain and three CDRs of the light chain, are excised from cells secreting rodent mAb and grafted into the DNA coding for the framework of the human antibody. Because only the antigen-binding site CDRs, rather than the entire variable domain of the rodent antibody are transplanted, the resulting humanized antibody (a second generation or “hyperchimeric” antibody) is reportedly less immunogenic than a first generation chimeric antibody. This process has been further improved to include changes referred to as “reshaping” (Verhoeyen, et al., “Reshaping human antibodies: grafting an anti-lysozyme activity,” 1988 Science 239: 1534-1536; Riechmann, et al., “Reshaping human antibodies for therapy,” 1988 Nature 332: 323—337; Tempest, et al., “Reshaping human monoclonal antibody to inhibit respiratory syncitial virus infection in vivo,” Bio/Technol 1991 9: 266-271), “hyperchimerization” (Queen, et al., “A humanized antibody that binds to the human interleukin 2 receptor,” 1989 Proc Natl Acad Sci USA 86: 10029-10033; Co, et al., “Humanized antibodies for antiviral therapy,” 1991 Proc Natl Acad Sci USA 88: 2869-2873; Co, et al., “Chimeric and humanized antibodies with specificity for the CD33 antigen,” 1992 J Immunol 148: 1149-1154), and “veneering” (Mark, et al., “Derivation of therapeutically active humanized and veneered anti-CD18 antibodies. In: Metcalf BW, Dalton BJ, eds. Cellular adhesion: molecular definition to therapeutic potential. New York: Plenum Press, 1994: 291-312). In the reshaping process on the basis of homology, the rodent variable region is compared with the consensus sequence of the protein sequence subgroup to which it belongs. Similarly, the selected human constant region accepting framework is compared with its family consensus sequence. Gussowal, et al., “Humanization of monoclonal antibodies,” 1991 Meth Enzymol 203: 99-121. The sequence analyses identify residues, which may have undergone mutation during the affinity maturation procedure and may therefore be idiosyncratic. Inclusion of the more common human residues is said to lessen immunogenicity problems by replacing human acceptor idiosyncratic residues. Further, the reshaping process is said to allow comparison of human and rodent consensus sequences to identify any systematic “species” differences. RSV19 antibodies were humanized by employing this procedure. Taylor et al., “Humanized monoclonal antibody to respiratory syncitial virus,” 1991 Lancet 337: 1411-1412; Tempest, et al., “Reshaping a human monoclonal antibody to inhibit human respiratory syncitial virus infection in vivo,” 1991 Bio/Technol 9: 266-271. Hyperchimerization is an alternative method of identifying residues outside CDR regions that are likely to be involved in the reconstitution of binding activity. In this method, the human sequences are compared with murine variable region sequences and the one with highest homology is selected as the acceptor framework. As in the reshaping procedure, the “idiosyncratic” residues are replaced by more commonly occurring human residues. The non-CDR residues that may be interacting with the CDR sequences are identified. Finally, it is determined which one of these residues is to be included in the variable region framework. Humanized antibodies against CD33 antigen were reportedly developed by this method. Co, et al., “Chimeric and humanized antibodies with specificity for the CD33 antigen,” 1992 J Immunol 148: 1149-154. See also Carter, et al., “Humanization of an anti-p185 HER2 antibody for human cancer therapy,” 1992 Proc Natl Acad Sci USA 89: 4285-4289. The displayed surface of the protein is the primary determinant of its immunogenicity. A humanized murine antibody can thus be made less immunogenic by replacing exposed residues that differ from those commonly found in human antibodies. This method of humanization is referred to as “veneering.” Appropriate replacement of the outer residues may have little or no impact on the inner domains or interdomain framework. Veneering is a two-step process. In the first step, the most homologous human variable regions are selected and compared by each single residue to the corresponding mouse variable regions. In the second step, the mouse framework residues, which differ from its human homologue, are replaced by the residues present in the human homologue. This replacement involves only those residues that are on the surface and at least partially exposed.

[0061] Nevertheless, it took more than a quarter century of research for monoclonal antibody technology and genetic engineering methods to result in the development of immunoglobulin molecules for treatment of human diseases. Indeed, it was not until the past five years that monoclonal antibodies became as an expanding class of therapeutics. See Glennie M J and van de Winkel J G, Drug Discov Today 2003 Jun. 1;8(11): 503-10; Souriau C and Hudson P J, “Recombinant antibodies for cancer diagnosis and therapy,” 2003 Expert Opin Biol Ther. 3(2): 305-18. See also Pendley C, et al., “Immunogenicity of therapeutic monoclonal antibodies,” 2003 Curr Opin Mol Ther. 5(2): 172-9.

[0062] All the same, an average of less than one therapeutic antibody per year has been introduced to the market beginning in 1986, eleven years after the publication of monoclonal antibodies. Five murine monoclonal antibodies were introduced into human medicine over a ten year period from 1986-1995, including “muromonab-CD3” (OrthoClone OKT3®), which binds to a molecule on the surface of T cells and was launched in 1986 to prevent acute rejection of organ transplants; “edrecolomab” (Panorex®), launched in 1995 for treatment of colorectal cancer; “odulimomab” (Antilfa®), launched in 1997 for use in transplant rejection; and, “ibritumomab” (Zevalin® yiuxetan), launched in 2002 for use in non-Hodgkin's lymphoma. Addtionally, one monoclonal Fab, “abciximab” (ReoPro®), was lauchned in 1995. It inhibits the clumping of platelets by binding the receptors on their surface that normally are linked by fibrinogen and may be helpful in preventing reclogging of the coronary arteries in patients who have undergone angioplasty. Three chimeric monoclonal antibodies were also launched: “rituximab” (Rituxan®), in 1997, which binds to the CD20 molecule found on most B cells and is used to treat B cell lymphomas; “basiliximab” (Simulect®), in 1998 for transplant rejection; and “infliximab” (Remicade®) which binds to tumor necrosis factor-alpha (TNF-a), in 1998 for treatment of as rheumatoid arthritis and Crohn's disease. Additionally, “abciximab” (ReoPro®), a 47.6 kD Fab fragment of the chimeric human-murine monoclonal antibody 7E3 that binds to the glycoprotein (GP) IIb/IIIa receptor of human platelets, was launched in 1995 as an adjunct to percutaneous coronary intervention for the prevention of cardiac ischemic complications in patients undergoing percutaneous coronary intervention. Finally, seven “humanized” monoclonals were launched from 1997-2003: “daclizumab” (Zenapax®) in 1997, which binds to part of the IL-2 receptor produced at the surface of activated T cells and is used to prevent acute rejection of transplanted kidneys; “palivizumab” (Synagis®) in 1998 for RSV; “trastuzumab” (Herceptin®) in 1998, which binds HER-2, a growth factor receptor found on breast cancers cells; “gemtuzumab” (Mylotarg®) in 2000, which is a conjugate of a monoclonal antibody that binds CD33, a cell-surface molecule expressed-by the cancerous cells in acute myelogenous leukemia (AML) but not found on the normal stem cells needed to repopulate the bone marrow; and “alemtuzumab” (MabCampath®&) in 2001, which binds to CD52, a molecule found on white blood cells and has produced temporary remission of chronic lymphocytic leukemia; “adalimumab” (Humira® (D2E7)), a human anti-TNF monoclonal containing human-derived heavy chain and light chain variable regions and human IgG:κ constant regions was launched in 2002 for the treatment of rheumatoid arthritis; and, “omalizumab” (Xolair®), which binds to IgE and prevents it from binding to mast cells was approved in 2003 for the treatment of adults and adolescents over 12 years of age with moderate to severe persistent asthma who have a positive skin test or in vitro reactivity to a perennial aeroallergen and whose symptoms are inadequately controlled with inhaled corticosteroids.

[0063] Thus, protein engineering has been applied in an effort to diminish problems related to immunogenicity of administered recombinant immunoglobulin polypeptides and to try to alter antibody effector functions. However, problems remain. For example, the majority of cancer patients treated with rituximab relapse, generally within about 6-12 months, and fatal infusion reactions within 24 hours of rituximab infusion have been reported. These fatal reactions followed an infusion reaction complex that included hypoxia, pulmonary infiltrates, acute respiratory distress syndrome, myocardial infarction, ventricular fibrillation or cardiogenic shock. Acute renal failure requiring dialysis with instances of fatal outcome has also been reported in the setting of tumor lysis syndrome following treatment with rituximab, as have severe mucocutaneous reactions, some with fatal outcome. Additionally, high doses of rituximab are required for intravenous injection because the molecule is large, approximately 150 kDa, and diffusion is limited into the lymphoid tissues where many tumor cells reside.

[0064] Trastuzumab administration can result in the development of ventricular dysfunction and congestive heart failure, and the incidence and severity of cardiac dysfunction has been reported to be particularly high in patients who received trastuzumab in combination with anthracyclines and cyclophosphamide. Trastuzumab administration can also result in severe hypersensitivity reactions (including anaphylaxis), infusion reactions, and pulmonary events.

[0065] Patients receiving daclizumab immunosuppressive therapy are at increased risk for developing lymphoproliferative disorders and opportunistic infections, and it is not known whether daclizumab use will have a long-term effect on the ability of the immune system to respond to antigens first encountered during daclizumab-induced immunosuppression.

[0066] Hepatotoxicity, including severe hepatic veno-occlusive disease (VOD), has also been reported in association with the use of gemtuzumab as a single agent, as part of a combination chemotherapy regimen, and in patients without a history of liver disease or hematopoietic stem-cell transplant (HSCT). Patients who receive gemtuzumab either before or after HSCT, patients with underlying hepatic disease or abnormal liver function, and patients receiving gemtuzumab in combinations with other chemotherapy may be at increased risk for developing severe VOD. Death from liver failure and from VOD has been reported in patients who received gemtuzumab, and it has been cautioned that even careful monitoring may not identify all patients at risk or prevent the complications of hepatotoxicity.

[0067] Hepatotoxicity was also reported in patients receiving alemtuzumab. Serious and, in some rare instances fatal, pancytopenia/marrow hypoplasia, autoimmune idiopathic thrombocytopenia, and autoimmune hemolytic anemia have occurred in patients receiving alemtuzumab therapy. Alemtuzumab can also result in serious infusion reactions as well as opportunistic infections.

[0068] In patients treated with adalimumab, serious infections and sepsis, including fatalities, have been reported, as has the exacerbation of clinical symptoms and/or radiographic evidence of demyelinating disease, and patients treated with adalimumab in clinical trials had a higher incidence of lymphoma than the expected rate in the general population.

[0069] Serious adverse reactions in clinical studies with omalizumab have included malignancies and anaphylaxis, in which the observed incidence of malignancy among omalizumab-treated patients (0.5%) was numerically higher than among patients in control groups (0.2%).

[0070] Smaller immunoglobulin molecules have been constructed in an effort to overcome various problems associated with whole immunoglobulin therapy. Single chain immunoglobulin variable region fragment polypeptides (scFvs) are made of an immunoglobulin heavy chain variable domain joined via a short linker peptide to an immunoglobulin light chain variable domain. Huston et al., 1988Proc. Natl. Acad. Sci. USA, 85: 5879-83. It has been suggested that the smaller size of scFv molecules may lead to more rapid clearance from plasma and more effective penetration into tissues than whole immunoglobulins. See, e.g., Jain, 1990 Cancer Res. 50: 814s-819s. An anti-tumor scFv was reported to show more rapid tumor penetration and more even distribution through the tumor mass than the corresponding chimeric antibody. Yokota et al., Cancer Res. 52: 3402-08 (1992).

[0071] Despite advantages that scFv molecules may have with regard to serotherapy, drawbacks to this therapeutic approach also exist. For example, rapid clearance of scFv may prevent delivery of a minimum effective dose to the target tissue. Additionally, manufacturing adequate amounts of scFv for administration to patients has been challenging due to difficulties in expression and isolation of scFv that adversely affect yields. During expression, scFv molecules lack stability and often aggregate due to pairing of variable regions from different molecules. Furthermore, production levels of scFv molecules in mammalian expression systems are reportedly low, which may limit the potential for efficient manufacturing of scFv molecules for therapy. Davis et al., 1990 J. Biol. Chem. 265: 10410-18; Traunecker et al., 1991 EMBO J. 10: 3655-59. Strategies for means to improve production have been explored, and reportedly include the addition of glycosylation sites to variable regions. See, e.g., U.S. Pat. No. 5,888,773; Jost et al., 1994 J. Biol. Chem. 269: 26267-73. Another disadvantage to the use of scFvs for therapy is the lack of effector function. An scFv that lacks the cytolytic functions, ADCC, and complement dependent-cytotoxicity may be less effective or ineffective for treating disease. Even though development of scFv technology began over 12 years ago, there are currently no scFv products approved for therapy.

[0072] Alternatively, it has been proposed that fusion of an scFv to another molecule, such as a toxin, could take advantage of the specific antigen-binding activity and the small size of an scFv to deliver the toxin to a target tissue. Chaudary et al., 1989 Nature 339: 394; Batra et al., 1991 Mol. Cell. Biol. 11: 2200. Conjugation or fusion of toxins to scFvs has thus been offered as an alternative strategy to provide potent, antigen-specific molecules, but dosing with such conjugates or chimeras can be limited by excessive and/or non-specific toxicity due to the toxin moiety of such preparations. Toxic effects may include supraphysiological elevation of liver enzymes and vascular leak syndrome, and other undesired effects. In addition, immunotoxins are themselves highly immunogenic upon administration to a host, and host antibodies generated against the immunotoxin limit potential usefulness for repeated therapeutic treatments of an individual.

[0073] Fusion proteins in which immunoglobulin constant region polypeptide sequences are present and nonimmunoglobulin sequences are substituted for the antibody variable regions have also been investigated. For example, CD4, the T cell surface protein recognized by HIV, was recombinantly fused to an immunoglobulin Fc effector domain, and an IL-2-IgG1 fusion protein reportedly effected complement-mediated lysis of IL-2 receptor-bearing cells. See Sensel et al., Chem. Immunol. 65: 129-158 (1997).

[0074] An extensive introduction as well as detailed information about all aspects of recombinant antibody technology can be found in the textbook “Recombinant Antibodies” (John Wiley & Sons, NY, 1999). A comprehensive collection of detailed antibody engineering lab Protocols can be found in R. Kontermann and S. Dübel (eds.), “The Antibody Engineering Lab Manual” (Springer Verlag, Heidelberg/N.Y., 2000). Diseases and disorders thought to be amenable to some type of immunoglobulin therapy include cancer and immune system disorders. Cancer includes a broad range of diseases, affecting approximately one in four individuals worldwide. Rapid and unregulated proliferation of malignant cells is a hallmark of many types of cancer, including hematological malignancies. Although patients with a hematologic malignant condition have benefited from advances in cancer therapy in the past two decades, Multani et al., 1998 J. Clin. Oncology 16: 3691-3710, and remission times have increased, most patients still relapse and succumb to their disease. Barriers to cure with cytotoxic drugs include, for example, tumor cell resistance and the high toxicity of chemotherapy, which prevents optimal dosing in many patients.

[0075] Nevertheless, patients have been treated with immunotherapeutics that target malignant cells, i.e., to antigens expressed on tumor cells. With regard to the selection of tumor cell surface antigens suitable for use as immunotherapy targets, it is preferable that such a target antigen is not expressed by normal tissues, particularly where the preservation of such tissue is important to host survival. In the case of hematologic malignancy, malignant cells express many antigens that are not expressed on the surfaces of stem cells or other essential cells. Treatment of a hematologic malignant condition using a therapeutic regimen that depletes both normal and malignant cells of hematological origin has been acceptable where regeneration of normal cells from progenitors can occur after therapy has ended. Additionally, the target antigen is desireably expressed on all or virtually all clonogenic populations of tumor cells, and it is best that expression persists despite selective pressure from immunoglobulin therapy. Strategies that employ selection of a cell surface idiotype (e.g., a particular idiotope) as a target for therapy of B cell malignancy have been limited by the outgrowth of tumor cell variants with altered surface idiotype expression, even where the antigen exhibits a high degree of tumor selectivity. Meeker et al., 1985 N. Engl. J. Med. 312: 1658-65. The selected antigen should also traffic properly after an immunoglobulin binds to it. Shedding or internalization of a cell surface target antigen after an immunoglobulin binds to the antigen may allow tumor cells to escape destruction, thus limiting the effectiveness of serotherapy. Finally, binding of an immunoglobulin to cell surface target antigens that transmit or transduce cellular activation signals may result in improved functional responses to immunotherapy in tumor cells, and can lead to growth arrest and/or apoptosis. While all of these properties are important, the triggering of apoptosis after an immunoglobulin binds to the target antigen may also be a critical factor in achieving successful serotherapy.

[0076] Antigens that have been tested as targets for serotherapy of B and T cell malignancies include Ig idiotype (Brown et al., 1989 Blood 73: 651-61), CD19 (Hekman et al., 1991 Cancer Immunol. Immunother. 32: 364-72), Vlasveld et al., 1995 Cancer Immunol. Immunother. 40: 37-47), CD20 (Press et al., 1987 Blood 69: 584-91), Maloney et al., 1997 J. Clin. Oncol. 15: 3266-74), CD21 (Scheinberg et al., 1990 J. Clin. Oncol. 8: 792-803), CD5 (Dillman et al., 1986 J. Biol. Respn. Mod. 5: 394-410), and CD52 (CAMPATH) (Pawson et al., 1997 J. Clin. Oncol. 15: 2667-72). Of these, greater benefit for therapy of B cell lymphomas has been obtained using molecules that target CD20. Other targets have been limited by biological properties of the antigen. For example, surface idiotype can be altered through somatic mutation, allowing tumor cell escape. CD5, CD21, and CD19 are rapidly internalized after monoclonal antibody binding, allowing tumor cells to escape destruction unless monoclonal antibodies are conjugated with toxin molecules. CD22 is expressed on only a subset of B cell lymphomas, thereby limiting its usefulness, while CD52 is expressed on both T cells and B cells and may therefore generate counterproductive immunosuppression by depletion.

[0077] Treatment of patients with low grade or follicular B cell lymphoma using a chimeric CD20 monoclonal antibody has been reported to induce partial or complete responses in patients. McLaughlin et al., 1996 Blood 88: 90a (abstract, suppl. 1); Maloney et al., 1997 Blood 90: 2188-95. However, as noted above, tumor relapse commonly occurs within six months to one year. Further improvements in serotherapy are needed to induce more durable responses, for example, in low grade B cell lymphoma, and to allow effective treatment of high grade lymphoma and other B cell diseases.

[0078] Another approach has been to target radioisotopes to B cell lymphomas using monoclonal antibodies specific for CD20. While the effectiveness of therapy is reportedly increased, associated toxicity from the long in vivo half-life of the radioactive antibody increases also, sometimes requiring that the patient undergo stem cell rescue. Press et al., 1993 N. Eng. J. Med. 329: 1219-1224; Kaminski et al., 1993 N. Eng. J. Med. 329: 459-65. Monoclonal antibodies to CD20 have also been cleaved with proteases to yield F(ab′)₂ or Fab fragments prior to attachment of radioisotope. This has been reported to improve penetration of the radioisotope conjugate into the tumor and to shorten the in vivo half-life, thus reducing the toxicity to normal tissues. However, these molecules lack effector functions, including complement fixation and/or ADCC.

[0079] CD20 was the first human B cell lineage-specific surface molecule identified by a monoclonal antibody. It is a non-glycosylated, hydrophobic 35 kDa B cell transmembrane phosphoprotein that has both amino and carboxy ends situated in the cytoplasm. Einfeld et al., 1988 EMBO J. 7: 711-17. CD20 is expressed by all normal mature B cells, but is not expressed by precursor B cells. Natural ligands for CD20 have not been identified, and the function of CD20 in B cell biology is still incompletely understood.

[0080] Anti-CD20 monoclonal antibodies affect the viability and growth and growth of B cells. Clark et al., 1986 Proc. Natl. Acad. Sci. USA 83: 4494-98. Extensive cross-linking of CD20 can induce apoptosis in B lymphoma cell lines, Shan et al., 1998 Blood 91: 1644-52, and cross-linking of CD20 on the cell surface has been reported to increase the magnitude and enhance the kinetics of signal transduction, for example, as detected by measuring tyrosine phosphorylation of cellular substrates. Deans et al., 1993 J. Immunol. 146: 846-53. Therefore, in addition to cellular depletion by complement and ADCC mechanisms, Fc-receptor binding by CD20 monoclonal antibodies in vivo may promote apoptosis of malignant B cells by CD20 cross-linking, consistent with the theory that effectiveness of CD20 therapy of human lymphoma in a SCID mouse model may be dependent upon Fc-receptor binding by the CD20 monoclonal antibody. Funakoshi et al., 1996 J. Immunotherapy 19: 93-101. The presence of multiple membrane spanning domains in the CD20 polypeptide (Einfeld et al., 1988 EMBO J. 7: 711-17; Stamenkovic et al., 1988 J. Exp. Med. 167: 1975-80; Tedder et al., 1988 J. Immunol. 141: 4388-4394), prevent CD20 internalization after antibody binding, and this was recognized as an important feature for therapy of B cell malignancies when a murine CD20 monoclonal antibody, IF5, was injected into patients with B cell lymphoma, resulting in significant depletion of malignant cells and partial clinical responses. Press et al., 1987 Blood 69: 584-91.

[0081] Because normal mature B cells also express CD20, normal B cells are depleted by anti-CD20 antibody therapy. Reff, M. E. et al., 1994 Blood 83: 435-445. After treatment is completed, however, normal B cells can be regenerated from CD20 negative B cell precursors; therefore, patients treated with anti-CD20 therapy do not experience significant immunosuppression. Depletion of normal B cells may also be beneficial in diseases that involve inappropriate production of autoantibodies or other diseases where B cells may play a role. A chimeric monoclonal antibody specific for CD20, consisting of heavy and light chain variable regions of mouse origin fused to human IgG1 heavy chain and human kappa light chain constant regions, reportedly retained binding to CD20 and the ability to mediate ADCC and to fix complement. Liu et al., 1987 J. Immunol. 139: 3521-26. The mechanism of anti-tumor activity of rituximab, discussed above, is thought to be a combination of several activities, including ADCC, complement fixation, and triggering of signals that promote apoptosis in malignant B cells, although the large size of rituximab prevents optimal diffusion of the molecule into lymphoid tissues that contain malignant B cells, thereby limiting these anti-tumor activities. Autoimmune diseases include autoimmune thyroid diseases, which include Graves' disease and Hashimoto's thyroiditis. In the United States alone, there are about 20 million people who have some form of autoimmune thyroid disease. Autoimmune thyroid disease results from the production of autoantibodies that either stimulate the thyroid to cause hyperthyroidism (Graves' disease) or destroy the thyroid to cause hypothyroidism (Hashimoto's thyroiditis). Stimulation of the thyroid is caused by autoantibodies that bind and activate the thyroid stimulating hormone (TSH) receptor. Destruction of the thyroid is caused by autoantibodies that react with other thyroid antigens. Current therapy for Graves' disease includes surgery, radioactive iodine, or antithyroid drug therapy. Radioactive iodine is widely used, since antithyroid medications have significant side effects and disease recurrence is high. Surgery is reserved for patients with large goiters or where there is a need for very rapid normalization of thyroid function. There are no therapies that target the production of autoantibodies responsible for stimulating the TSH receptor. Current therapy for Hashimoto's thyroiditis is levothyroxine sodium, and therapy is usually lifelong because of the low likelihood of remission. Suppressive therapy has been shown to shrink goiters in Hashimoto's thryoiditis, but no therapies that reduce autoantibody production to target the disease mechanism are known.

[0082] Rheumatoid arthritis (RA) is a chronic disease characterized by inflamation of the joints, leading to swelling, pain, and loss of function. RA effects an estimated 2.5 million people in the United States. RA is caused by a combination of events including an initial infection or injury, an abnormal immune response, and genetic factors. While autoreactive T cells and B cells are present in RA, the detection of high levels of antibodies that collect in the joints, called rheumatoid factor, is used in the diagnosis of RA. Current therapy for RA includes many medications for managing pain and slowing the progression of the disease. No therapy has been found that can cure the disease. Medications include nonsteroidal antiinflamatory drugs (NSAIDS), and disease modifying antirheumatic drugs (DMARDS). NSAIDS are useful in benign disease, but fail to prevent the progression to joint destruction and debility in severe RA. Both NSAIDS and DMARDS are associated with signficant side effects. Only one new DMARD, Leflunomide, has been approved in over 10 years. Leflunomide blocks production of autoantibodies, reduces inflamation, and slows progression of RA. However, this drug also causes severe side effects including nausea, diarrhea, hair loss, rash, and liver injury.

[0083] Systemic Lupus Erythematosus (SLE) is an autoimmune disease caused by recurrent injuries to blood vessels in multiple organs, including the kidney, skin, and joints. SLE is estimated to affect over 500,000 people in the United States. In patients with SLE, a faulty interaction between T cells and B cells results in the production of autoantibodies that attack the cell nucleus. These include anti-double stranded DNA and anti-Sm antibodies. Autoantibodies that bind phospholipids are also found in about half of SLE patients, and are responsible for blood vessel damage and low blood counts. Immune complexes accumulate the kidneys, blood vessels, and joints of SLE patients, where they cause inflamation and tissue damage. No treatment for SLE has been found to cure the disease. NSAIDS and DMARDS are used for therapy depending upon the severity of the disease. Plasmapheresis with plasma exchange to remove autoantibodies can cause temporary improvement in SLE patients. There is general agreement that autoantibodies are responsible for SLE, so new therapies that deplete the B cell lineage, allowing the immune system to reset as new B cells are generated from precursors, would offer hope for long lasting benefit in SLE patients.

[0084] Sjogren's syndrome is an autoimmune disease characterized by destruction of the body's moisture-producing glands. Sjogren's syndrome is one of the most prevelant autoimmune disorders, striking up to an estimated 4 million people in the united states. About half of people stricken with Sjogren's syndrome also have a connective tissue disease, such as RA, while the other half have primary Sjogren's syndrome with no other concurrent autoimmune disease. Autoantibodies, including anti-nuclear antibodies, rheumatoid factor, anti-fodrin, and anti-muscarinic receptor are often present in patients with Sjogren's syndrome. Conventional therapy includes corticosteroids, and additional more effective therapies would be of benefit.

[0085] Immune thrombocytopenic purpura (ITP) is caused by autoantibodies that bind to blood platelets and cause their destruction. Some cases of ITP are caused by drugs, and others are associated with infection, pregnancy, or autoimmune disease such as SLE. About half of all cases are classified as “idiopathic”; meaning the cause is unknown. The treatment of ITP is determined by the severity of the symptoms. In some cases, no therapy is needed although in most cases immunosuppressive drugs, including corticosteroids or intravenous infusions of immune globulin to deplete T cells, are provided. Another treatment that usually results in an increased number of platelets is removal of the spleen, the organ that destroys antibody-coated platelets. More potent immunosuppressive drugs, including cyclosporine, cyclophosphamide, or azathioprine are used for patients with severe cases. Removal of autoantibodies by passage of patients' plasma over a Protein A column is used as a second line treatment in patients with severe disease. Additional more effective therapies are desired.

[0086] Multiple sclerosis (MS) is also an autoimmune disease. It is characterized by inflamation of the central nervous system and destruction of myelin, which insulates nerve cell fibers in the brain, spinal cord, and body. Although the cause of MS is unknown, it is widely believed that autoimmune T cells are primary contributors to the pathogenesis of the disease. However, high levels of antibodies are present in the cerebral spinal fluid of patients with MS, and some theories predict that the B cell response leading to antibody production is important for mediating the disease. No B cell depletion therapies have been studies in patients with MS, and there is no cure for MS. Current therapy is corticosteroids, which can reduce the duration and severity of attacks, but do not affect the course of MS over time. New biotechnology interferon (IFN) therapies for MS have recently been approved but additional more effectiver therapies are desired.

[0087] Myasthenia Gravis (MG) is a chronic autoimmune neuromuscular disorder that is characterized by weakness of the voluntary muscle groups. MG effects about 40,000 people in the united states. MG is caused by autoantibodies that bind to acetylcholine receptors expressed at neuromuscular junctions. The autoantibodies reduce or block acetylcholine receptors, preventing the transmission of signals from nerves to muscles. There is no known cure for mg. Common treatments include immunosuppression with corticosteroids, cyclosporine, cyclophosphamide, or azathioprine. Surgical removal of the thymus is often used to blunt the autoimmune response. Plasmapheresis, used to reduce autoantibody levels in the blood, is effective in mg, but is short-lived because the production of autoantibodies continues. Plasmapheresis is usually reserved for severe muscle weakness prior to surgery. New and effective therapies would be of benefit.

[0088] Psoriasis effects approximately five million people, and is characterized by autoimmune inflammation in the skin. Psoriasis is also associated with arthritis in 30% (psoriatic arthritis). Many treatments, including steroids, uv light retenoids, vitamin d derivatives, cyclosporine, methotrexate have been used but it is also plain that psoriasis would benefit from new and effective therapies. Scieroderma is a chronic autoimmune disease of the connective tissue that is also known as systemic sclerosis. Scleroderrna is characterized by an overproduction of collagen, resulting in a thickening of the skin, and approxiamtely 300,000 people in the united states have scleroderma, which would also benefit from new and effective therapies.

[0089] There is a clear need for improved compositions and methods to treat malignacies, including B cell malignancies and disorders including autoimmnune diseases, disorders, and conditions, as well as other diseases, disorders, and conditions. The compositions and methods of the present invention described and claimed herein provide such improved compositions and methods as well as other advantages.

### SUMMARY OF THE INVENTION

[0090] It is an aspect of the present invention to provide a binding domain-immunoglobulin fusion protein, comprising a binding domain polypeptide that is fused or otherwise connected to an immunoglobulin hinge or hinge-acting region polypeptide, which in turn is fused or otherwise connected to a region comprising one or more native or engineered constant regions from an immunoglobulin heavy chain, other than CH1, for example, the CH2 and CH3 regions of IgG and IgA, or the CH3 and CH4 regions of IgE. The binding domain-immunoglobulin fusion protein further comprises a region that comprises, consists essentially of, or consists of, a native or engineered immunoglobulin heavy chain CH2 constant region polypeptide (or CH3 in the case of a construct derived in whole or in part from IgE) that is fused or otherwise connected to the hinge region polypeptide and a native or engineered immunoglobulin heavy chain CH3 constant region polypeptide (or CH4 in the case of a construct derived in whole or in part from IgE) that is fused or otherwise connected to the CH2 constant region polypeptide (or CH3 in the case of a construct derived in whole or in part from IgE). Such binding domain-immunoglobulin fusion proteins are capable of at least one immunological activity selected from the group consisting of antibody dependent cell-mediated cytotoxicity and complement fixation. Such binding domain polypeptides are also capable of binding or specifically binding to a target, for example, a target antigen.

[0091] In certain embodiments, for example, the binding domain polypeptide comprises at least one immunoglobulin variable region polypeptide that is selected from a native or engineered immunoglobulin light chain variable region polypeptide and/or a native or engineered immunoglobulin heavy chain variable region polypeptide. In certain further embodiments the binding domain-immunoglobulin fusion protein comprises a native or engineered immunoglobulin heavy chain variable region polypeptide, wherein the heavy chain variable region polypeptide is an engineered human immunoglobulin heavy chain variable region polypeptide (or an engineered immunoglobulin heavy chain variable region polypeptide from a non-human species) comprising a mutation, substitution, or deletion of an amino acid(s) at a location corresponding to any one or more of amino acid positions 9, 10, 11, 12, 108, 110, and/or 112. Mutations, substitutions, or deletions of an amino acid(s) at a location corresponding to any one or more of amino acid positions 9, 10, 11, 12, 108, 110, and/or 112 in a heavy chain variable region may be included within a construct such as the construct corresponding to, for example, SEQ ID NO:______. In certain other further embodiments the fusion protein comprises a polypeptide having a sequence selected from SEQ ID NOS:______ or SEQ ID NO:______. In certain embodiments the immunoglobulin variable region polypeptide is derived from, for example, a human immunoglobulin, and in certain other embodiments the immunoglobulin variable region polypeptide comprises a humanized immunoglobulin polypeptide sequence. In certain embodiments the immunoglobulin variable region polypeptide, whether or not humanized, is derived from a murine immunoglobulin, or is derived from an immunoglobulin from another species, including, for example a rat, a pig, a monkey, or a camelid.

[0092] According to certain embodiments of the present invention, the binding domain polypeptide comprises, consists essentially of, or consists of, (a) at least one native or engineered immunoglobulin light chain variable region polypeptide; (b) at least one native or engineered immunoglobulin heavy chain variable region polypeptide; and (c) at least one linker polypeptide that is fused or otherwise connected to the polypeptide of (a) and to the polypeptide of (b). In certain further embodiments the native or engineered immunoglobulin light chain variable region and heavy chain variable region polypeptides are derived or constructed from human immunoglobulins, and in certain other further embodiments the linker polypeptide comprises at least one polypeptide including or having as an amino acid sequence Gly-Gly-Gly-Gly-Ser [SEQ ID NO:______]. In other embodiments the linker polypeptide comprises at least two or three repeats of a polypeptide having as an amino acid sequence Gly-Gly-Gly-Gly-Ser [SEQ ID NO:______]. In other embodiments the linker comprises a glycosylation site, which in certain further embodiments is an asparagine-linked glycosylation site, an O-linked glycosylation site, a C-mannosylation site, a glypiation site or a phosphoglycation site. In another embodiment at least one of a native or engineered immunoglobulin heavy chain CH2 constant region polypeptide and a native or engineered immunoglobulin heavy chain CH3 constant region polypeptide is derived from an IgG or IgA human immunoglobulin heavy chain. In another embodiment at least one of a native or engineered immunoglobulin heavy chain CH3 constant region polypeptide and a native or engineered immunoglobulin heavy chain CH4 constant region polypeptide is derived from an IgE human immunoglobulin heavy chain.

[0093] An immunoglobulin hinge region polypeptide may comprise, consist essentially or, or consist of, for example, any of (1) any hinge or hinge-acting peptide or polypeptide that occurs naturally for example, a human immunoglobulin hinge region polypeptide including, for example, a wild-type human IgG hinge or a portion thereof, a wild-type human IgA hinge or a portion thereof, a wild-type human IgD hinge or a portion thereof, or a wild-type human IgE hinge-acting region, i.e., IgE CH2, or a portion thereof, a wild-type camelid hinge region or a portion thereof (including a IgG1 llama hinge region or portion thereof, a IgG2 llama hinge region or portion thereof, and a IgG3 llama hinge region or portion thereof), a nurse shark hinge region or portion thereof, and/or a spotted ratfish hinge region or a portion thereof; (2) a mutated or otherwise altered or engineered hinge region polypeptide that contains no cysteine residues and that is derived or constructed from a wild-type immunoglobulin hinge region polypeptide having one or more cysteine residues; (3) a mutated or otherwise altered or engineered hinge region polypeptide that contains one cysteine residue and that is derived from a wild-type immunoglobulin hinge region polypeptide having one or more cysteine residues; (4) a hinge region polypeptide that has been mutated or otherwise altered or engineered to contain or add one or more glycosylation sites, for example, an asparagine-linked glycosylation site, an O-linked glycosylation site, a C-mannosylation site, a glypiation site or a phosphoglycation site; (5) a mutated or otherwise altered or engineered hinge region polypeptide in which the number of cysteine residues is reduced by amino acid substitution or deletion, for example, a mutated or otherwise altered or engineered IgG1 or IgG4 hinge region containing for example zero, one, or two cysteine residues, a mutated or otherwise altered or engineered IgG2 hinge region containing for example zero, one, two or three cysteine residues, a mutated or otherwise altered or engineered IgG3 hinge region containing for example zero, one, two, three, or from four to ten cysteine residues, or a mutated or otherwise altered or engineered human IgA1 or IgA2 hinge region polypeptide that contains zero or only one or two cysteine residues (e.g., an “SCC” hinge), a mutated or otherwise altered or engineered IgD hinge region containing no cysteine residues, or a mutated or otherwise altered or engineered human IgE hinge-acting region, i.e., IgE CH2 region polypeptide that contains zero or only one, two, three or four cysteine residues; or (6) any other connecting region molecule described or referenced herein or otherwise known or later discovered as useful for connecting adjoining immunoglobulin domains such as, for example, a CH1 domain and a CH2 domain. For example, a hinge region polypeptide may be selected from the group consisting of (i) a wild-type human IgG1 immunoglobulin hinge region polypeptide, for example, (ii) a mutated or otherwise altered or engineered human IgG 1 or other immunoglobulin hinge region polypeptide that is derived or constructed from a wild-type immunoglobulin hinge region polypeptide having three or more cysteine residues, wherein said mutated human IgG1 or other immunoglobulin hinge region polypeptide contains two cysteine residues and wherein a first cysteine of the wild-type hinge region is not mutated, (iii) a mutated or otherwise altered or engineered human IgG1 or other immunoglobulin hinge region polypeptide that is derived from a wild-type immunoglobulin hinge region polypeptide having three or more cysteine residues, wherein said mutated human IgG1 or other immunoglobulin hinge region polypeptide contains no more than one cysteine residue, and (iv) a mutated or otherwise altered or engineered human IgG1 or other immunoglobulin hinge region polypeptide that is derived from a wild-type immunoglobulin hinge region polypeptide having three or more cysteine residues, wherein said mutated or otherwise altered or engineered human IgG1 or other immunoglobulin hinge region polypeptide contains no cysteine residues. In certain embodiments, for example, the immunoglobulin hinge region polypeptide is a mutated or otherwise altered or engineered hinge region polypeptide and exhibits a reduced ability to dimerize, relative to a wild-type human immunoglobulin G or other wild type hinge region or hinge-acting polypeptide.

[0094] The immunoglobulin heavy chain constant region polypeptides may be, for example, native or engineered CH2 and CH3 domains of an isotype that is human IgG or human IgA. The immunoglobulin heavy chain constant region polypeptides may also be, for example, native or engineered immunoglobulin heavy chain constant region CH3 and CH4 polypeptides of an isotype that is human IgE.

[0095] In certain other embodiments the target or target antigen may be, for example, CD19 (B-lymphocyte antigen CD19, also referred to as B-lymphocyte surface antigen B4, or Leu-12), CD20 (B-lymphocyte antigen 20, also referred to as B-lymphocyte surface antigen B1, Leu-16, or Bp35), CD22 (B-cell receptor CD22, also referred to as Leu-14, B-lymphocyte cell adhesion molecule, or BL-CAM), CD37 (leukocyte antigen CD37), CD40 (B-cell surface antigen CD40, also referred to as Tumor Necrosis Factor receptor superfamily member 5, CD40L receptor, or Bp50), CD80 (T lymphocyte activation antigen CD80, also referred to as Activation B7-1 antigen, B7, B7-1, or BB1), CD86 (T lymphocyte activation antigen CD86, also referred to as Activation B7-2 antigen, B70, FUN-1, or BU63), CD137 (also referred to as Tumor Necrosis Factor receptor superfamily member 9), CD152 (also referred to as cytotoxic T-lymphocyte protein 4 or CTLA-4), CD45 (Leukocyte common antigen, also referred to as L-CA, T200, and EC 3.1.3.48), CD45RA (an isoform of CD45, and an antigen expressed on nafve or immature lymphocytes), CD45RB (an isoform of CD45); CD45RO (an isoform of CD45, and a common leukocyte antigen expressed on memory B and T cells), L6 (Tumor-associated antigen L6, also referred to as Transmembrane 4 superfamily member 1, Membrane component surface marker 1, or M3S1), CD2 (T-cell surface antigen CD2, also referred to as T-cell surface antigen T11/Leu-5, LFA-2, LFA-3 receptor, Erythrocyte receptor, or Rosette receptor), CD28 (T-cell-specific homodimer surface protein CD28, also referred to as Tp44), CD30 (lymphocyte activation antigen CD30, also referred to as Tumor Necrosis Factor receptor superfamily member 8, CD30L receptor, or Ki-1), CD50 (also referred to as Intercellular adhesion molecule-3 (ICAM3), or ICAM-R), CD54 (also referred to as Intercellular adhesion molecule-1 (ICAM1), or Major group rhinovirus receptor), B7-H1 (ligand for an immunoinhibitory receptor expressed by activated T cells, B cells, and myeloid cells, also referred to as PD-L1; see Dong, et al., “B7-H1, a third member of the B7 family, co-stimulates T-cell proliferation and interleukin-10 secretion,” 1999 Nat. Med. 5: 1365-1369), CD134 (also referred to as Tumor Necrosis Factor receptor superfamily member 4, OX40, OX40L receptor, ACT35 antigen, or TAX-transcriptionally activated glycoprotein 1 receptor), 41BB (4-1BB ligand receptor, T-cell antigen 4-1BB, or T-cell antigen ILA), CD153 (also referred to as Tumor Necrosis Factor ligand superfamily member 8, CD30 ligand, or CD30-L), CD154 (also referred to as Tumor Necrosis Factor ligand superfamily member 5, CD40 ligand, CD40-L, TNF-related activation protein, TRAP, or T cell antigen Gp39), ICOS (Inducible Costimulator), CD3 (one or more of the delta, epsilon, gamma, eta and/or zeta chains, alone or in combination), CD4 (T-cell surface glycoprotein CD4, also referred to as T-cell surface antigen T4/Leu-3), CD25 (also referred to as Interleukin-2 receptor alpha chain, IL-2 receptor alpha subunit, p55, or Tac antigen), CD8α (T-cell surface glycoprotein CD8 alpha chain, also referred to as T-lymphocyte differentiation antigen, T8/Leu-2, and Lyt-2), CD11b (also referred to as Integrin alpha-M, Cell surface glycoprotein MAC-1 alpha subunit, CR-3 alpha chain, Leukocyte adhesion receptor Mol, or Neutrophil adherence receptor), CD14 (Monocyte differentiation antigen CD14, also referred to as Myeloid cell-specific leucine-rich glycoprotein or LPS receptor), CD56 (also referred to as Neural cell adhesion molecule 1), or CD69 (also referred to as Early T-cell activation antigen p60, Gp32/28, Leu-23, MLR-3, Activation inducer molecule, or AIM). The above list of construct targets and/or target antigens is exemplary only and is not exhaustive.

[0096] In another aspect, the invention includes a binding construct (or a polynucleotide encoding such a construct) that comprises a CD154 extracellular domain, or desired funtional portion thereof. In one embodiment of this aspect of the invention, for example, the binding construct comprises a CD 154 extracellular domain fused or otherwise connected to a second binding domain. The second binding domain, for example, may comprise, consist essentially of, or consist of at least one immunoglobulin variable region polypeptide. The at least one immunoglobulin variable region polypeptide may be a native or engineered scFv. The native or engineered scFv may be a native or engineered scFv disclosed or described herein. The second binding domain, including a native or engineered scFv, may be one that binds, for example, to any of the targets, including target antigens, disclosed or described herein, including but not limited to, for example, any of B7-H1, ICOS, L6, CD2, CD3, CD8, CD4, CD11b, CD14, CD19, CD20, CD22, CD25, CD28, CD30, CD37, CD40, CD45, CD50, CD54, CD56, CD69, CD80, CD86, CD134, CD137, CD152, CD153, or CD154.

[0097] In another embodiment the binding domain polypeptide comprises a CTLA-4 extracellular domain, or desired funtional portion thereof, and in further embodiments at least one of the immunoglobulin heavy chain constant region polypeptides selected from a CH2 constant region polypeptide and a CH3 constant region polypeptide is a human IgG1 constant region polypeptide, either native or engineered.

[0098] In another further embodiment at least one of the immunoglobulin heavy chain constant region polypeptides selected from a CH2 constant region polypeptide and a CH3 constant region polypeptide is a human IgA constant region polypeptide, either native or engineered.

[0099] In another further embodiment at least one of the immunoglobulin heavy chain constant region polypeptides selected from a CH3 constant region polypeptide and a CH4 constant region polypeptide is a human IgE constant region polypeptide, either native or engineered.

[0100] Turning to another embodiment, the present invention provides a binding domain-immunoglobulin fusion protein, comprising, consisting essentially of, or consisting of, (a) a binding domain polypeptide that is fused or otherwise connected to an immunoglobulin hinge region polypeptide; (b) a native or engineered immunoglobulin heavy chain CH2 (or IgE Ch3) constant region polypeptide that is fused or otherwise connected to the hinge region polypeptide; and (c) a native or engineered immunoglobulin heavy chain CH3 (or IgE CH4) constant region polypeptide that is fused or otherwise connected to the CH2 (or IgE CH3) constant region polypeptide, wherein (1) the binding domain polypeptide comprises a CTLA-4 extracellular domain, or a portion thereof, that is capable of binding or specifically binding to at least one CTLA-4 ligand selected from the group consisting of CD80 and CD86, (2) the immunoglobulin hinge region polypeptide may be as described above or herein, and may comprise, consist essentially of, or consist of, for example, a polypeptide that is selected from the group consisting of a native or engineered human IgA hinge region polypeptide, a native or engineered human IgG1 hinge region polypeptide, and a native or engineered human IgE CH2 region polypeptide (3) a immunoglobulin heavy chain constant region polypeptide that comprises, consists essentially of, or consists of, a polypeptide that is selected from the group consisting of a native or engineered human IgA heavy chain CH2 constant region polypeptide, a native or engineered human IgG1 heavy chain CH2 constant region polypeptide, and a native or engineered human IgE heavy chain CH3 constant region polypeptide (4) a immunoglobulin heavy chain constant region polypeptide that comprises, consists essentially of, or consists of, a polypeptide that is selected from the group consisting of a native or engineered human IgA heavy chain CH3 constant region polypeptide, a native or engineered human IgG1 heavy chain CH3 constant region polypeptide, and a native or engineered human IgE heavy chain CH4 constant region polypeptide, and (5) the binding domain-immunoglobulin fusion protein is capable of inducing at least one immunological activity selected from the group consisting of antibody dependent cell-mediated cytotoxicity, CDC, and complement fixation.

[0101] In another embodiment the present invention provides a binding domain-immunoglobulin fusion protein, comprising, consisting esstentially of, or consisting of (a) a binding domain polypeptide that is fused or otherwise connected to an immunoglobulin hinge region polypeptide, wherein said hinge region polypeptide may be as described above or herein, and may comprise, consist essentially of, or consist of, for example, a native or engineered human IgE hinge-acting region, i.e., a IgE CH2 region polypeptide; (b) a first native or engineered immunoglobulin heavy chain constant region polypeptide that is fused or otherwise connected to the hinge region polypeptide, wherein said native or engineered constant region polypeptide comprises, consists essentially of, or consists of, a native or engineered human IgE CH3 constant region polypeptide; and (c) a second native or engineered immunoglobulin heavy chain constant region polypeptide that is fused or otherwise connected to the first native or engineered constant region polypeptide, wherein said native or engineered second constant region polypeptide comprises, consists essentially of, or consists of, a native or engineered human IgE CH4 constant region polypeptide and wherein (1) the binding domain-immunoglobulin fusion protein is capable of inducing at least one immunological activity selected from antibody dependent cell-mediated cytotoxicity and induction of an allergic response mechanism, and (2) the binding domain polypeptide is capable of binding or specifically binding to an antigen. In a further embodiment the antigen is a tumor antigen.

[0102] In certain other embodiments the present invention provides a binding domain-immunoglobulin fusion protein, comprising, consisting essentially of, or consisting of, (a) a binding domain polypeptide that is fused or otherwise connected to an immunoglobulin hinge region polypeptide, wherein the binding domain polypeptide is capable of binding or specifically binding to at least one antigen that is present on an immune effector cell and wherein the hinge region polypeptide may be as described above or herein, and may comprise, consist essentially of, or consist of, for example, a polypeptide selected from the group consisting of a native or engineered human IgA hinge region polypeptide, a native or engineered human IgG hinge region polypeptide, and a native or engineered human IgE hinge-acting region, i.e., IgE CH2 region polypeptide; (b) a first native or engineered immunoglobulin heavy chain constant region polypeptide that is fused or otherwise connected to the hinge region polypeptide, wherein said first native or engineered constant region polypeptide comprises, consists essentially of, or consists of, a polypeptide selected from the group consisting of a native or engineered human IgA CH2 constant region polypeptide, a native or engineered human IgG CH2 constant region polypeptide, and a native or engineered human IgE CH3 constant region polypeptide; (c) a second native or engineered immunoglobulin heavy chain constant region polypeptide that is fused or otherwise connected to the first constant region polypeptide, wherein said second constant region polypeptide comprises, consists essentially of, or consists of, a polypeptide selected from the group consisting of a native or engineered human IgA CH3 constant region polypeptide, a native or engineered human IgG CH3 constant region polypeptide, and a native or engineered human IgE CH4 constant region polypeptide; and (d) a native or engineered plasma membrane anchor domain polypeptide. In one example of this embodiment, the plasma membrane anchor domain polypeptide links to a membrane via a native or engineered glycosyl-phosphatidylinositol-linkage. In a further embodiment the plasma membrane anchor domain polypeptide comprises, consists essentially of, or consists of, a native or engineered transmembrane domain polypeptide. In another further embodiment the membrane anchor domain polypeptide comprises, consists essentially of, or consists of, a native or engineered transmembrane domain polypeptide and a native or engineered cytoplasmic tail polypeptide. In a still further embodiment the cytoplasmic tail polypeptide comprises, consists essentially of, or consists of, a native or engineered apoptosis signaling polypeptide sequence, which in a still further embodiment is derived or constructed from a native or engineered receptor death domain polypeptide, a death domain, or a functional portion of either. In a further embodiment the native or engineered death domain polypeptide comprises, consists essentially of, or consists of, for example, a native or engineered polypeptide selected from an ITIM domain (immunoreceptor Tyr-based inhibition motif), an ITAM domain (immunoreceptor Tyr-based activation motif), TRAF, RIP, CRADD, FADD (Fas-associated death domain), TRADD (Tumor Necrosis Factor receptor type 1 associated DEATH domain protein), RAIDD (also referred to as RAID), CD95 (Tumor Necrosis Factor receptor superfamily member 6, also referred to as FASL receptor, Apoptosis-mediating surface antigen FAS, FAS and Apo-1 antigen), TNFR1, and/or DR5 (death receptor-5). In another embodiment the native or engineered apoptosis signaling polypeptide sequence comprises, consists essentially of, or consists of, for example, a polypeptide sequence derived from a native or engineered caspase polypeptide that is caspase-3 or caspase-8 or caspase-10, including caspase 8/FLICE/MACH/Mch5 and caspase 10/Flice2/Mch4. In another embodiment the plasma membrane anchor domain polypeptide comprises, consists essentially of, or consists of, for example, a native or engineered glycosyl-phosphatidylinositol-linkage polypeptide sequence. In another embodiment the antigen that is present on an immune effector cell is, for example, CD2, CD16, CD28, CD30, CD32, CD40, CD50, CD54, CD64, CD80, CD86, B7-H1, CD134, CD137, CD152, CD153, CD154, ICOS, CD19, CD20, CD22, CD37, L6, CD3, CD4, CD25, CD8, CD11b, CD14, CD56, or CD69. In another embodiment the human IgG is a native or engineered human IgG1. These binding domain-immunoglobulin fusion proteins may be capable of inducing, for example, at least one immunological activity selected from antibody dependent cell-mediated cytotoxicity and/or complement fixation and/or CDC, and are capable of binding or specifically binding to a target, including, for example, a target antigen. Immune effector cells include, for example, granulocytes, mast cells, monocytes, macrophages, dendritic cells, neutrophils, eosinophils, basophils, NK cells, T cells (including Th1 cells, Th2 cells, Tc cells, memory T cells, null cells, and large granular lymphocytes, etc.), and B cells. This embodiment of the invention further includes the use of such proteins for therapy, and, for example, the use of such vectors for in vivo and ex vivo gene therapy. The above lists of construct components and targets are not exhaustive and may include any desired target or component that may function as, or be useful for the purposes, described herein.

[0103] In another embodiment, the invention provides a protein having a first protein motif that comprises, consists essentially of, or consists of, (1) a native or engineered immunoglobulin hinge region or hinge-acting region (e.g., IgE CH2) polypeptide that is fused or otherwise connected to (2) a native or engineered CH2 constant region polypeptide (or native or engineered IgE CH3 constant region polypeptide). Said first protein motif may be fused or otherwise connected to one or more other such first protein motifs to form a second protein motif, the second protein motif being fused or otherwise connected to (3) a native or engineered CH3 constant region (or a native or engineered IgE CH4 constant region) to form a third protein motif. Said first, second or third protein motifs may be fused or otherwise connected to one or more of the herein-described native or engineered plasma membrane anchor domain polypeptides, including, for example, a native or engineered transmembrane domain polypeptide, and a native or engineered transmembrane domain polypeptide and a native or engineered cytoplasmic tail polypeptide, such as for example, a native or engineered apoptosis signaling polypeptide sequence, which may be derived or constructed from a native or engineered receptor death domain polypeptide, a death domain, or a functional portion of either. Thus, a protein or polynucleiotide within this aspect of the invention may be, for example, a Hinge-CH2—CH3-TransmembraneDomain-DeathDomain construct. It may also be, for example, a (Hinge-CH2)ₓ—CH3— TransmembraneDomain-DeathDomain construct, where X is from 2 to about 5, or such other number as may be needed to achieve a desired length or Fc receptor binding and/or complement fixation function(s). This embodiment of the invention also includes polynucleotides encoding such proteins, vectors including such polynucleotides, and host cells containing such polynucleotides and vectors. This embodiment of the invention further includes the use of such proteins for therapy, and, for example, the use of such polynuceotides and/or vectors for in vivo and ex vivo gene therapy. The invention provides, in another embodiment, a binding domain-immunoglobulin fusion protein, comprising, consisting essentially of, or consisting of, (a) a binding domain polypeptide that is fused or otherwise connected to an immunoglobulin hinge region polypeptide, wherein the binding domain polypeptide is capable of binding or specifically binding to at least one antigen that is present on a cancer cell surface and wherein the hinge region polypeptide may be as described above or herein, and may comprise, consist essentially of, or consist of, for example, a polypeptide selected from the group consisting of a native or engineered human IgA hinge region polypeptide, a native or engineered human IgG hinge region polypeptide, and a native or engineered human IgE hinge-acting region, i.e., IgE CH2, region polypeptide; (b) a first native or engineered immunoglobulin heavy chain constant region polypeptide that is fused or otherwise connected to the hinge region polypeptide, wherein the first constant region polypeptide comprises, consists essentially of, or consists of, a polypeptide that is a native or engineered human IgA CH2 constant region polypeptide, a native or engineered human IgG CH2 constant region polypeptide, or a native or engineered human IgE CH3 constant region polypeptide; and (c) a second native or engineered immunoglobulin heavy chain constant region polypeptide that is fused or otherwise connected to the first constant region polypeptide, wherein the second constant region polypeptide comprises, consists essentially of, or consists of, a polypeptide that is a native or engineered human IgA CH3 constant region polypeptide, a native or engineered human IgG CH3 constant region polypeptide, or a native or engineered human IgE CH4 constant region polypeptide. In a further embodiment the human IgG polypepdides are native or engineered human IgG1 polypeptides.

[0104] In another embodiment the present invention provides a binding domain-immunoglobulin fusion protein, comprising, consisting essentially of, or consisting of, (a) a binding domain polypeptide that is fused or otherwise connected to an immunoglobulin hinge region polypeptide, wherein said hinge region polypeptide may be as described above or herein, and may comprises, consist essentially of, or consist of, for example, a wild-type or engineered human IgA hinge region polypeptide; (b) a native or engineered immunoglobulin heavy chain CH2 constant region polypeptide that is fused or otherwise connected to the hinge region polypeptide, wherein said native or engineered CH2 constant region polypeptide comprises, consists essentially of, or consists of, a native or engineered human IgA CH2 constant region polypeptide; and (c) a native or engineered immunoglobulin heavy chain CH3 constant region polypeptide that is fused or otherwise connected to the native or engineered CH2 constant region polypeptide, wherein the native or engineered CH3 constant region polypeptide comprises, consists essentially of, or consists of, a polypeptide that is (i) a wild-type human IgA CH3 constant region polypeptide or other IgA region, preferably human or humanized, that is capable of associating with J Chain, (ii) a mutated, altered or otherwise engineered human IgA CH3 constant region polypeptide that is, for example, incapable of associating with a J chain, wherein (1) the binding domain-immunoglobulin fusion protein is capable of at least one immunological activity selected from the group consisting of antibody dependent cell-mediated cytotoxicity, CDC, and complement fixation, and (2) the binding domain polypeptide is capable of binding or specifically binding to a target such as, for example, an antigen. In certain further embodiments the mutated human IgA CH3 constant region polypeptide that is incapable of associating with a J chain is (i) a polypeptide comprising, consisting essentially of, or consisting of, an amino acid sequence as set forth in SEQ ID NO:______or (ii) a polypeptide comprising, consisting essentially of, or consisting of, an amino acid sequence as set forth in SEQ ID NO:______. In other embodiments, the IgA hinge region polypeptide is a native or engineered IgA1 hinge region polypeptide or a native or engineered IgA2 hinge region polypeptide. In still other embodiments, the IgA hinge region polypeptide is different from a wild-type IgA1 or IgA2 hinge region polypeptide by, for example, the alteration, substitution, or deltion of one or more of the cysteine residues within said wild-type hinge region.

[0105] In certain other embodiments the present invention provides a binding domain-immunoglobulin fusion protein, comprising, consisting essentially of, or consisting of (a) a binding domain polypeptide that is fused or otherwise connected to an immunoglobulin hinge region polypeptide; (b) a native or engineered immunoglobulin heavy chain CH2 constant region polypeptide that is fused or otherwise connected to the hinge region polypeptide, wherein the native or engineered CH2 constant region polypeptide comprises, consists essentially of, or consists of, a native or engineered llama CH2 constant region polypeptide that is a native or engineered llama IgG1 CH2 constant region polypeptide, a native or engineered llama IgG2 CH2 constant region polypeptide, or a native or engineered llama IgG3 CH2 constant region polypeptide; and (c) a native or engineered immunoglobulin heavy chain CH3 constant region polypeptide that is fused or otherwise connected to the native or engineered CH2 constant region polypeptide, wherein said native or engineered CH3 constant region polypeptide comprises, consists essentially of, or consists of, a native or engineered llama CH3 constant region polypeptide that is selected from the group consisting of a native or engineered llama IgG1 CH3 constant region polypeptide, a native or engineered llama IgG2 CH3 constant region polypeptide and a native or engineered llama IgG3 CH3 constant region polypeptide wherein (1) the binding domain-immunoglobulin fusion protein is capable of at least one immunological activity selected from the group consisting of antibody dependent cell-mediated cytotoxicity, fixation of complement and CDC, and (2) the binding domain polypeptide is capable of binding or specifically binding to a target, for example a target antigen. In a further embodiment the immunoglobulin hinge region polypeptide, the native or engineered llama CH2 constant region polypeptide and the native or engineered llama CH3 constant region polypeptide comprise sequences derived from a native or engineered llama IgG1 polypeptide and the fusion protein does not include a native or engineered llama IgG1 CH1 domain. In certain embodiments the invention provides any of the above described binding domain-immunoglobulin fusion proteins wherein the hinge region polypeptide is mutated, engineered, or otherwise altered to contain a glycosylation site, which in certain further embodiments is an asparagine-linked glycosylation site, an O-linked glycosylation site, a C-mannosylation site, a glypiation site or a phosphoglycation site.

[0106] In certain embodiments the invention, there are provided any of the above or herein described binding constructs, including binding domain-immunoglobulin fusion proteins, wherein a binding region or binding domain polypeptide comprises two or more binding domain polypeptide sequences wherein each of the binding domain polypeptide sequences is capable of binding or specifically binding to a target(s) such as an antigen(s), which target(s) or antigen(s) may be the same or may be different. A native, for more preferably an engineered, IgD hinge is a desired connecting region between binding domains of a bispecific molecule of the invention, i.e., one with two or more binding domains, preferably two. The wild type human IgD hinge has one cysteine that forms a disulfide bond with the light chain in the native IgD structure. It is desirable to mutate or delete this cysteine in the human IgD hinge for use as a connecting region between binding domains of, for example, a bispecific molecule. Other amino acid changes or deletions or alterations in an IgD hinge that do not result in undesired hinge inflexibility are within the scope of the invention native or engineered IgD hinge regions from other species are also within the scope of the invention, as are humanized native or engineered IgD hinges from non-human species. The present invention also provides, in certain embodiments, a binding domain-immunoglubulin fusion protein, comprising, consisting essentially of, or consisting of (a) a binding domain polypeptide that is fused or otherwise connected to an immunoglobulin hinge region polypeptide, wherein the hinge region polypeptide may be as described above or herein, and may comprise, consist essentially of, or consist of, for example, an alternative hinge region polypeptide sequence; (b) a first native or engineered immunoglobulin heavy chain constant region, such as an IgG or IgA CH2 constant region polypeptide (or an IgE CH3 constant region polypeptide) that is fused or otherwise connected to the hinge region polypeptide; and (c) a second native or engineered immunoglobulin heavy chain constant region, such as an IgG or IgA CH3 constant region polypeptide (or an IgE CH4 constant region polypeptide) that is fused or otherwise connected to the first constant region polypeptide, wherein: (1) the binding domain-immunoglobulin fusion protein is capable of at least one immunological activity selected from the group consisting of antibody dependent cell-mediated cytotoxicity, CDC, and complement fixation, and (2) the binding domain polypeptide is capable of binding or specifically binding to a target, such as an antigen.

[0107] Turning to another embodiment there is provided a binding domain-immunoglobulin fusion protein, comprising, consisting essentially of, or consisting of (a) a binding domain polypeptide that is fused or otherwise connected to an immunoglobulin hinge region polypeptide, wherein the binding domain polypeptide is capable of binding or specifically binding to at least one target, such as an antigen, that is present on a cancer cell surface and wherein the hinge region polypeptide may be as described above or herein, and may comprise, consist essentially of, or consist of, for example, an alternative hinge region polypeptide sequence; (b) a first native or engineered immunoglobulin heavy chain constant region polypeptide that is fused or otherwise connected to the hinge region polypeptide, wherein said native or engineered constant region polypeptide comprises, consists essentially of, or consists of, a polypeptide selected from the group consisting of a native or engineered human IgA CH2 constant region polypeptide, a native or engineered human IgG CH2 constant region polypeptide, and a native or engineered human IgE CH3 constant region polypeptide; and (c) a second immunoglobulin heavy chain constant region polypeptide that is fused or otherwise connected to the first constant region polypeptide, wherein the second constant region polypeptide comprises, consists essentially of, or consists of, a polypeptide that is a native or engineered human IgA CH3 constant region polypeptide, a native or engineered human IgG CH3 constant region polypeptide, or a native or engineered human IgE CH4 constant region polypeptide. In certain further embodiments the alternative hinge region polypeptide sequence comprises, consists essentially of, or consists of, a polypeptide sequence of at least ten continuous amino acids that are present in a sequence selected from SEQ ID NOS:______-______.

[0108] In certain embodiments the present invention provides polynucleotides or vectors (including cloning vectors and expression vectors) or transformed or transfected cells, including isolated or purified or pure polynucleotides, vectors, and isolated transformed or transfected cells, encoding or containing any one of the above or herein described polypeptide or protein constructs of the invention, for example, including binding domain-immunoglobulin fusion proteins. Thus, in various embodiments the invention provides a recombinant cloning or expression construct comprising any such polynucleotide that is operably linked to a promoter.

[0109] In other embodiments there is provided a host cell transformed or transfected with, or otherwise containing, any such recombinant cloning or expression construct. Host cells include the cells of a subject undergoing ex vivo cell therapy including, for example, ex vivo gene therapy.

[0110] In a related embodiment there is provided a method of producing a polypeptide or protein or other construct of the invention, for example, including a binding domain-immunoglobulin fusion protein, comprising the steps of (a) culturing a host cell as described or provided for herein under conditions that permit expression of the construct, for example, a binding domain-immunoglobulin fusion protein; and (b) isolating the construct, for example, the binding domain-immunoglobulin fusion protein from the host cell or host cell culture.

[0111] In another embodiment there is provided a pharmaceutical composition comprising any one of the above or herein described polypeptide or protein or other constructs of the invention, for example (including, for example, binding domain-immunoglobulin fusion proteins), in combination with a physiologically acceptable carrier.

[0112] In another embodiment the invention provides a pharmaceutical composition comprising, for example, an isolated, purified, or pure polynucleotide encoding any one of the polypeptide or protein constructs of the invention, for example (including, for example, binding domain-immunoglobulin fusion proteins), in combination with a physiologically acceptable carrier, or for example, in combination with, or in, a gene therapy delivery vehicle or vector.

[0113] In another embodiment the invention provides a method of treating a subject having or suspected of having a malignant condition or a B cell disorder, comprising administering to a patient a therapeutically effective amount of any of the pharmaceutical compositions described or claimed herein.

[0114] In certain further embodiments the malignant condition or B cell disorder is a B cell lymphoma or B cell leukemia, or a disease characterized by autoantibody production, and in certain other further embodiments the B cell disorder is, for example, rheumatoid arthritis, myasthenia gravis, Grave's disease, type I diabetes mellitus, multiple sclerosis or an autoimmune disease. In certain other embodiments the malignant condition is, for example, melanoma, myeloma, glioma, astrocytoma, lymphoma, leukemia, carcinoma, or sarcoma, and so on.

[0115] It is another aspect of the present invention to provide a binding domain-immunoglobulin fusion protein, comprising, consisting essentially or, or consisting of, (a) a binding domain polypeptide that is fused or otherwise connected to an immunoglobulin hinge region polypeptide, wherein said hinge region polypeptide is as described herein, and may be selected from the group consisting of (i) a mutated, engineered or otherwise altered hinge region polypeptide that contains no cysteine residues and that is derived from a wild-type immunoglobulin hinge region polypeptide having one or more cysteine residues, (ii) a mutated, engineered or otherwise altered hinge region polypeptide that contains one cysteine residue and that is derived from a wild-type immunoglobulin hinge region polypeptide having two or more cysteine residues, (iii) a wild-type human IgA hinge region polypeptide, (iv) a mutated, engineered or otherwise altered human IgA hinge region polypeptide that contains no cysteine residues, (v) a mutated, engineered or otherwise altered human IgA hinge region polypeptide that contains one cysteine residue and (vi) a mutated, engineered or otherwise altered human IgA hinge region polypeptide that contains two cysteine residues; (b) a native or engineered immunoglobulin heavy chain CH2 constant region polypeptide that is fused or otherwise connected to the hinge region polypeptide; and (c) a native or engineered immunoglobulin heavy chain CH3 constant region polypeptide that is fused or otherwise connected to the CH2 constant region polypeptide, wherein: (1) the binding domain-immunoglobulin fusion protein is capable of at least one immunological activity selected from the group consisting of antibody dependent cell-mediated cytotoxicity and complement fixation, and (2) the binding domain polypeptide is capable of binding or specifically binding to an antigen. In one embodiment the immunoglobulin hinge region polypeptide is a mutated hinge region polypeptide, for example, and the resulting construct exhibits a reduced ability to dimerize, relative to a construct containing a wild-type human immunoglobulin G hinge region polypeptide. In another embodiment the binding domain polypeptide comprises, consists essentially of, or consists of, at least one native or engineered immunoglobulin variable region polypeptide that is a native or engineered immunoglobulin light chain variable region polypeptide and/or a native or engineered immunoglobulin heavy chain variable region polypeptide. In a further embodiment the native or engineered immunoglobulin variable region polypeptide is derived from a human immunoglobulin and, for example, may be humanized.

[0116] In another embodiment, the invention provides a binding domain-immunoglobulin fusion protein includes a binding domain polypeptide that comprises, consists essentially of, or consists of, (a) at least one native or engineered immunoglobulin light chain variable region polypeptide; (b) at least one native or engineered immunoglobulin heavy chain variable region polypeptide; and (c) at least one linker peptide that is fused or otherwise connected to the polypeptide of (a) and to the polypeptide of (b). In a further embodiment the native or engineered immunoglobulin light chain variable region and the native or engineered heavy chain variable region polypeptides are derived from human immunoglobulins and may, for example, be humanized. In another embodiment at least one of the native or engineered immunoglobulin heavy chain CH2 (or IgE CH3) constant region polypeptide and the native or engineered immunoglobulin heavy chain CH3 (or IgE CH4) constant region polypeptide is derived or constructed from a human immunoglobulin heavy chain. In another embodiment the native or engineered immunoglobulin heavy chain constant region CH2 and CH3 polypeptides are of, or are derived or otherwise prepared or constructed from, an isotype selected from human IgG and human IgA. In another embodiment the target, for example, the target antigen is selected from the group consisting of CD16, CD19, CD20, CD37, CD40, CD45RO, CD80, CD86, CD137, CD152, and L6. In certain further embodiments of the above described fusion protein construct, the binding domain comprises, consists essentially of, or consists of, an scFv and the scFv contains a linker polypeptide that comprises, consists essentially of, or consists of, at least one polypeptide comprising or having as an amino acid sequence Gly-Gly-Gly-Gly-Ser [SEQ ID NO:______], and in certain other embodiments the linker polypeptide comprises, consists essentially of, or consists of, at least three repeats of a polypeptide having as an amino acid sequence Gly-Gly-Gly-Gly-Ser [SEQ ID NO:______]. In certain embodiments the immunoglobulin hinge region polypeptide comprises, consists essentially of, or consists of, a native or engineered human IdG, IgA, IgD hinge region polypeptide, or a native or engineered IgE CH2 region polypeptide. In certain embodiments the binding domain polypeptide comprises, consists essentially of, or consists of, a native or engineered CD154 extracellular domain. In certain embodiments the binding domain polypeptide comprises, consists essentially of, or consists of, a native or engineered CD154 extracellular domain and at least one a native or engineered immunoglobulin variable region polypeptide.

[0117] In other embodiments the invention provides an isolated polynucleotide encoding any of the constructs of the invention, for example, protein or polypeptide constructs of the invention including binding domain-immunoglobulin fusion proteins, and in related embodiments the invention provides a recombinant expression construct comprising such a polynucleotide, and in certain further embodiments the invention provides a host cell transformed or transfected with, or otherwise containing, such a recombinant expression construct. In another embodiment the invention provides a method of producing a construct of the invention, for example, a protein or polypeptide construct of the invention such as a binding domain-immunoglobulin fusion protein, comprising the steps of (a) culturing a host cell that has been transformed or transfected with, or otherwise made to contain, a polynucleotide construct of the invention under conditions that permit expression of the construct, for example, a construct encoding a binding domain-immunoglobulin fusion protein; and (b) isolating the construct, for example, the binding domain-immunoglobulin fusion protein, from the host cell culture.

[0118] The inventions described and claimed herein include novel molecules useful, for example, as therapeutics and other purposes including diagnostic and research purposes. Such molecules have, for example, antigen-binding or other binding function(s) and one or more effector functions. DNA constructs of the invention are useful in, for example, gene therapies, including in vivo and ex vivo gene therapies.

[0119] In one aspect, various constructs of the molecules of the invention include molecules comprising a “binding region”, a “tail” region, and a “connecting” region that joins a binding region and a tail region.

[0120] Binding regions within the molecules of the invention may comprise, for example, binding domains for desired targets, including antigen-binding targets. Binding domains for antigen binding targets may comprise, for example, single chain Fvs and scFv domains. In certain embodiments, molecules of the invention may comprise a binding region having at least one immunoglobulin variable region polypeptide, which may be a light chain or a heavy chain variable region polypeptide. In certain embodiments, molecules of the invention may comprise at least one such light chain V-region and one such heavy chain V-region and at least one linker peptide that connects the V-regions. ScFvs useful in the invention also include those with chimeric binding or other domains or sequences. Other ScFvs useful in the invention also include those with humanized binding or other domains or sequences. In such embodiments, all or a portion of an immunoglobulin binding or other sequence that is derived from a non-human source may be “humanized” according to recognized procedures for generating humanized antibodies, i.e., immunoglobulin sequences into which human Ig sequences are introduced to reduce the degree to which a human immune system would perceive such proteins as foreign.

[0121] Example of scFvs useful in the invention, whether included as murine or other scFvs (including human scFvs), chimeric scFvs, or humanized scFvs, in whole or in part, include anti-human CD20 scFvs (for example, “2H7” scFvs), anti-human CD37 scFvs (for example, “G28-1” scFvs), anti-human CD40 scFvs (for example, “G28-5” scFvs and “40.2.220” scFvs), anti-carcinoma-associated antigen scFvs (for example, “L6” scFvs), anti-CTLA-4 (CD152) scFvs (for example, “10A8” scFvs), anti-human CD28 scFvs (for example, “2E12” scFvs), anti-murine CD3 scFvs (for example, “500A2” scFvs), anti-human CD3 scFvs (for example, G19-4 scFvs), anti-murine 4-1BB scFvs (for example, “1D8” scFvs), anti-human 4-1BB scFvs (for example, “5B9” scFvs), anti-human CD45RO (for example, “UCHL-1” scFvs), and anti-human CD16 (for example, “Fc2” scFvs) scFvs useful in the invention also include scFvs, including chimeric and humanized scFvs, having one or more amino acid substitutions. A preferred amino acid substitution is at amino acid position 11 in the variable heavy chain (the V_{H}). Such a substitution may be referred to herein as “XXXV_{H}11 Zxx”. Thus, for example, where the normally occuring amino acid at position V_{H}11 is a Leucine, and a Serine amino acid residue is substituted therefor, the substitution is identified as “L V_{H}11S” or “Leu V_{H}11Ser.” Other preferred embodiments of the invention include molecules containining scFvs wherein the amino acid residue normally found at position V_{H}11 is deleted. Still other preferred embodiments embodiments of the invention include molecules containining scFvs wherein the amino acid residues normally found at positions V_{H}10 and/or V_{H}11 and/or V_{H}12 are substituted or deleted.

[0122] Other binding regions within the molecules of the invention may include domains that comprise sites for glycosylation, for example, covalent attachment of carbohydrate moieties such as monosaccharides or oligosaccharides.

[0123] Still other binding regions within molecules of the invention include polypeptides that may comprise proteins or portions thereof that retain the ability to specifically bind another molecule, including an antigen. Thus, binding regions may comprise or be derived from hormones, cytokines, chemokines, and the like; cell surface or soluble receptors for such polypeptide ligands; lectins; intercellular adhesion receptors such as specific leukocyte integrins, selectins, immunoglobulin gene superfamily members, intercellular adhesion molecules (ICAM-1, -2, -3) and the like; histocompatibility antigens; and so on. Binding regions derived from such molecules generally will include thoss portions of the molecules necessary or desired for binding to a target.

[0124] Certain constructs include binding regions that comprise receptor or receptor-binding domains. Receptor domains useful for binding to a target include, for example, a CD154 extracellular domain, or a CTLA-4 extracellular domain. In another example, the binding domain may include a first portion comprising, consisting essentially or, or consisting of, a CD154 extracellular domain and a second portion comprising, consisting essentially or, or consisting of, at least one immunoglobulin variable region polypeptide, said second portion including, for example, an scFv or a V_{H}. Examples of other cell surface receptors that may comprise, consist essentially or, or consist of, or a portion of which may provide, a binding region or binding domain polypeptide, include, for example, HER1, HER2, HER3, HER4, epidermal growth factor receptor (EGFR), vascular endothelial cell growth factor, vascular endothelial cell growth factor receptor, insulin-like growth factor-I, insulin-like growth factor-II, transferrin receptor, estrogen receptor, progesterone receptor, follicle stimulating hormone receptor (FSH-R), retinoic acid receptor, MUC-1, NY-ESO-1, Melan-A/MART-1, tyrosinase, Gp-100, MAGE, BAGE, GAGE, any of the CTA class of receptors including in particular HOM-MEL-40 antigen encoded by the SSX2 gene, carcinoembyonic antigen (CEA), and PyLT. Additional cell surface receptors that may be sources of binding regions or binding domain polypeptides include, for example, CD2, 4-1BB, 4-1BB ligand, CD5, CD10, CD27, CD28, CD152/CTLA-4, CD40, interferon-γ (IFN-γγ), interleukin-4 (IL-4), interleukin-17 (IL-17) and interleukin-17 receptor (IL-17R). Still other cell surface receptors that may be sources of binding regions and/or binding domain polypeptides include, for example, CD59, CD48, CD58/LFA-3, CD72, CD70, CD80/B7.1, CD86/B7.2, B7-H1/B7-DC, IL-17, CD43, ICOS, CD3 (e.g., gamma subunit, epsilon subunit, delta subunit), CD4, CD25, CD8, CD11b, CD14, CD56, CD69 and VLA-4 (α₄β₇). The following cell surface receptors are typically associated with B cells: CD19, CD20, CD22, CD30, CD153 (CD30 ligand), CD37, CD50 (ICAM-3), CD106 (VCAM-1), CD54 (ICAM-1), interleukin-12, CD134 (OX40), CD137 (41BB), CD83, and DEC-205. These lists are not exhaustive. Binding regions such as those set forth above may be connected, for example, by a native or engineered IgD hinge region polypeptide, preferably a human or humanized native or engineered IgD hinge region polypeptide. The invention thus further provides constructs that comprise, consist essentially of, or consist of, two binding regions, for example, an scFv and a cell surface receptor (or portion thereof), connected by a third molecule, for example, an IgD hinge region polypeptide as described herein.

[0125] Various molecules of the invention described and claimed herein include a connnecting region joining one end of the molecule to another end. Such connecting regions may comprise, for example, immunoglobulin hinge region polypeptides, including any hinge peptide or polypeptide that occurs naturally. A connecting region may also include, for example, any artificial peptide or other molecule (including, for example, non-peptide molecules, partial peptide molecules, and peptidomimetics, etc.) useful for joining the tail region and the binding region. These may include, for example, alterations of molecules situated in an immunoglobulin heavy chain polypeptide between the amino acid residues responsible for forming intrachain immunoglobulin-domain disulfide bonds in CH1 and CH2 regions. Naturally occurring hinge regions include those located between the constant region domains, CH1 and CH2, of an immunoglobulin. Useful immunoglobulin hinge region polypeptides include, for example, human immunoglobulin hinge region polypeptides and llama or other camelid immunoglobulin hinge region polypeptides. Other useful immunoglobulin hinge region polypeptides include, for example, nurse shark and spotted ratfish immunoglobulin hinge region polypeptides. Human immunoglobulin hinge region polypeptides include, for example, wild type IgG hinges including wild-type human IgG1 hinges, human IgG-derived immunoglobulin hinge region polypeptides, a portion of a human IgG hinge or IgG-derived immunoglobulin hinge region, wild-type human IgA hinge region polypeptides, human IgA-derived immunoglobulin hinge region polypeptides, a portion of a human IgA hinge region polypeptide or IgA-derived immunoglobulin hinge region polypeptide, wild-type human IgD hinge region polypeptides, human Ig-D derived immunoglobulin hinge region polypeptides, a portion of a human IgD hinge region polypeptide or IgD-derived immunoglobulin hinge region polypeptide, wild-type human IgE hinge-acting region, i.e., IgE CH2 region polypeptides (which generally have 5 cysteine residues), human IgE-derived immunoglobulin hinge region polypeptides, a portion of a human IgE hinge-acting region, i.e., IgE CH2 region polypeptide or IgE-derived immunoglobulin hinge region polypeptide, and so on. A polypeptide “derived from” or that is “a portion or fragment of” an immunoglobulin polypeptide chain region regarded as having hinge function has one or more amino acids in peptide linkage, for example 15-115 amino acids, preferably 95-110, 80-94, 60-80, or 5-65 amino acids, preferably 10-50, more preferably 15-35, still more preferably 18-32, still more preferably 20-30, still more preferably 21, 22, 23, 24, 25, 26, 27, 28 or 29 amino acids. Llama immunoglobulin hinge region polypeptides include, for example, an IgG1 llama hinge. The connecting region may comprise a stretch of consecutive amino acids from an immunoglobulin hinge region. For example, the connecting region can comprise at least five consecutive hinge region amino acids, at least ten consecutive hinge region amino acids, at least fifteen consecutive hinge region amino acids, at least 20 consecutive hinge region amino acids, and at least twenty five or more consecutive hinge region amino acids from human IgG hinge, human IgA hinge, human IgE hinge, camelid hinge region, IgG1 llama hinge region, nurse shark hinge region, and spotted ratfish hinge region, including for example an IgG, hinge region, a IgG₂ hinge region, a IgG3 hinge region, an IgG₃ hinge region, and an IgG₄ hinge region.

[0126] Such connecting regions also include, for example, mutated or otherwise altered or engineered immunoglobulin hinge region polypeptides. A mutated or otherwise altered or engineered immunoglobulin hinge region polypeptide may comprise, consist essentially of, or consist of, a hinge region that has its origin in an immunoglobulin of a species, of an immunoglobulin isotype or class, or of an immunoglobulin subclass that is the same or different from that of any included native or engineered CH2 and CH3 domains. Mutated or otherwise altered or engineered immunoglobulin hinge region polypeptides include those derived or constructed from, for example, a wild-type immunoglobulin hinge region that contains one or more cysteine residues, for example, a wild-type human IgG or IgA hinge region that naturally comprises three cysteines. In such polypeptides the number of cysteine residues may be reduced by amino acid substitution or deletion or truncation, for example. These polypeptides include, for example, mutated human or other IgG1 or IgG4 hinge region polypeptides containing zero, one, or two cysteine residues, and mutated human or other IgA1 or IgA2 hinge region polypeptides that contain zero, one, or two cysteine residues. Mutated or otherwise altered or engineered immunoglobulin hinge region polypeptides include those derived or constructed from, for example, a wild-type immunoglobulin hinge region that contains three or more cysteine residues, for example, a wild-type human IgG2 hinge region (which has 4 cysteines) or IgG4 hinge region (which has 11 cysteines). Mutated or otherwise altered or engineered immunoglobulin hinge region polypeptides include those derived or constructed from, for example, an IgE CH2 wild-type immunoglobulin region that generally contains five cysteine residues. In such polypeptides the number of cysteine residues may be reduced by one or more cysteine residues by amino acid substitution or deletion or truncation, for example. Also included are an altered hinge region polypeptides in which cysteine residues in the hinge region are substituted with serine or one or more other amino acids that are less polar, less hydrophobic, more hydrophilic, and/or neutral. Such mutated immunoglobulin hinge region polypeptides include, for example, mutated hinge region polypeptides that contain one cysteine residue and that are derived from a wild-type immunoglobulin hinge region polypeptide having two or more cysteine residues, such as a mutated human IgG or IgA hinge region polypeptide that contains one cysteine residue and that is derived from a wild-type human IgG or IgA region polypeptide. Connecting region polypeptides include immunoglobulin hinge region polypeptides that are compromised in their ability to form interchain, homodimeric disulfide bonds.

[0127] Mutated immunoglobulin hinge region polypeptides also include mutated hinge region polypeptides that exhibit a reduced ability to dimerize, relative to a wild-type human immunoglobulin G hinge region polypeptide, and mutated hinge region polypeptides that allow expression of a mixture of monomeric and dimeric molecules. Mutated immunoglobulin hinge region polypeptides also include hinge region polypeptides engineered to contain a glycosylation site. Glycosylation sites include, for example, an asparagine-linked glycosylation site, an O-linked glycosylation site, a C-mannosylation site, a glypiation site, and a phosphoglycation site.

[0128] Specific connecting regions useful in molecules of the invention described and claimed herein include, for example, the following 18 amino acid sequences, DQEPKSCDKTHTCPPCPA, DQEPKSSDKTHTSPPSPA, and DLEPKSCDKTHTCPPCPA. Other specific connecting regions include, for example, the mutant hinges within the sequences referred to herein as “2H7 scFv (SSS-S)H WCH2 WCH3” and “2H7 scFv (CSS)H WCH2 WCH3”, and the human IgA-derived hinge referred to herein as “2H7 scFv IgAH WCH2 WCH3”.

[0129] Tail regions within the molecules of the invention may include heavy chain constant region immunoglobulin sequences. Tail regions may thus include, for example, a polypeptide having at least one of an immunoglobulin heavy chain CH2 constant region polypeptide and an immunoglobulin heavy chain CH3 constant region polypeptide. At least one of the immunoglobulin heavy chain CH2 constant region polypeptide and the immunoglobulin heavy chain CH3 constant region polypeptide may be derived from a human immunoglobulin heavy chain. Thus, for example, CH2 and/or CH3 polypeptides may be derived from human IgG, human IgA, or human IgD molecules. Tail regions may also include, for example, a polypeptide having at least one of an immunoglobulin heavy chain CH3 constant region polypeptide and an immunoglobulin heavy chain CH4 constant region polypeptide. At least one of the immunoglobulin heavy chain CH3 constant region polypeptide and the immunoglobulin heavy chain CH4 constant region polypeptide may be derived from a human immunoglobulin heavy chain. Thus, for example, CH3 and/or CH4 polypeptides may be derived from human IgE. An immunoglobulin heavy chain CH2 region polypeptide included within a molecule of the invention may, for example, be from the IgG1, IgG2, IgG3 and/or IgG4 subclasses. An immunoglobulin heavy chain CH3 region polypeptide included within a molecule of the invention may also, for example, be from the IgG1, IgG2, IgG3 and/or IgG4 subclasses. Additionally, both the immunoglobulin heavy chain CH2 region polypeptide and the immunoglobulin heavy chain CH2 region polypeptide included within a molecule of the invention may, for example, be from the IgG1, IgG2, IgG3 and/or IgG4 subclasses. In other molecules of the invention at least one of the immunoglobulin heavy chain constant region polypeptides selected from a CH2 constant region polypeptide and a CH3 constant region polypeptide is a human IgA constant region polypeptide. An immunoglobulin heavy chain CH2 region polypeptide included within a molecule of the invention may, for example, be from the IgA1 and/or IgA2 subclasses. An immunoglobulin heavy chain CH3 region polypeptide included within a molecule of the invention may also, for example, be from the IgA1 and/or IgA2 subclasses. Additionally, both the immunoglobulin heavy chain CH2 region polypeptide and the immunoglobulin heavy chain CH2 region polypeptide included within a molecule of the invention may, for example, be from the IgA1 and/or IgA2 subclasses. In still other molecules of the invention, the tail region may comprise or consist essentially of a CH2 and/or CH3 constant region polypeptide comprising a polypeptide from human IgA and/or human IgE. In other embodiments, for example, the tail region within a molecule of the invention may include an immunoglobulin heavy chain CH2 and/or CH3 constant region polypeptide that is a mutated (for example, a mutated IgA CH3 constant region polypeptide that is incapable of associating with a J chain in which, for example, the IgA CH3 constant region polypeptide is of human origin). The tail region may also comprise, consist essentially of, or consist of an extracellular portion of a protein from the TNF superfamily, for example, CD154.

[0130] For molecules of the invention intended for use in humans, these regions will typically be substantially or completely human to minimize a potential human immune responses against the molecules and to provide appropriate effector functions. In certain embodiments of the invention, for example, the tail region includes a human IgG1 CH3 region sequence, a wild-type IgA heavy chain constant region polypeptide sequence that is capable or incapable of associating with J chain.

[0131] In preferred embodiments of the invention, a CH1 domain is not included in the tail region of the molecule, and the carboxyl end of the binding region is joined to the amino terminus of a CH2 portion of a tail region either directly or indirectly. A binding region may be indirectly joined to a tail region, for example via a connecting region polypeptide or other connecting molecule.

[0132] The invention also includes molecules that have mutated CH2 and/or CH3 sequences within a tail region. For example, a molecule of the invention may include a mutated Fc domain that has one or more mutations introduced into the CH2, CH3 and/or CH4 domains. In certain embodiments of the invention, molecules may include an IgA CH3 constant region polypeptide such as a human IgA CH3 constant region polypeptide in which two or more residues from the C-terminus have been deleted to yield a truncated CH3 constant region polypeptide. In other embodiments of the invention, molecules include a mutated human IgA CH3 constant region polypeptide that is incapable of associating with a J chain that comprises a C-terminal deletion of either four or 18 amino acids. However, the invention need not be so limited, such that molecules containing the mutated IgA CH3 constant region polypeptide may comprise a deletion of 2, 3, 4, 5, 6, 7, 8, 9, 10, 11, 12, 13, 14, 15, 16, 17, 18, 19, 20, 21-25, 26-30 or more amino acids, so long as the fusion protein is capable of specifically binding an antigen and capable of at least one immunological activity such as ADCC, CDC or complement fixation. The invention also includes molecules containing a tail region that comprises a mutated IgA CH3 constant region polypeptide that is incapable of associating with a J chain by virtue of replacement of the penultimate cysteine, or by chemical modification of that amino acid residue, in a manner that prevents interchain disulfide bond formation.

[0133] Various molecules of the invention include, for example, a binding domain scFv- fusion protein having a binding domain polypeptide comprising, consisting essentially of, or consisting of, (a) at least one immunoglobulin light chain variable region polypeptide, (b) at least one immunoglobulin heavy chain variable region polypeptide, and at least one linker peptide that joins the polypeptide of (a) and the polypeptide of (b). Such polypeptides may, for example, be derived from human immunoglobulins or non-human immunoglobulins.

[0134] Thus, in one aspect, the invention includes a non-naturally occurring single chain protein and/or V_{H} protein and/or V_{L} protein, or a desired portion of any of the above, including a first polypeptide comprising a binding domain polypeptide capable of binding to a target molecule, a second polypeptide comprising a flexible or other desired linker attached to said first polypeptide, a third polypeptide comprising a tail region, for example, an N-terminally truncated immunoglobulin heavy chain constant region polypeptide (or desired portion thereof) attached to the second polypeptide. The flexible linker may comprise, consist essentially of, or consist of, an immunoglobulin hinge region or portion thereof that has been mutated or otherwise altered or engineered, for example, one that contains a number of cysteine residues that is less than the number of cysteine residues present in the wild type immunoglobulin hinge region or portion (for example, zero, one, or two cysteines in the case of IgG1 or IgG4), and wherein said non-naturally occurring single-chain protein is capable of at least one immunological activity, for example, ADCC, CDC, and/or complement fixation. This protein may include a binding domain polypeptide which is a single chain Fv. Additionally, this protein may include a binding domain polypeptide which is a single chain Fv wherein the heavy chain variable region of the single chain Fv has an amino acid deletion or substitution at one or more of amino acid positions 9, 10, 11, 12, 108, 110, and 112. The protein may also include a binding domain polypeptide which is a single chain Fv wherein the light chain variable region of the single chain Fv has an amino acid deletion or substitution at one or more of amino acid positions 12, 80, 81, 83, 105, 106, and 107.

[0135] In another aspect, the invention includes a non-naturally occuring V_{H} protein, or a desired portion thereof, that comprises, consists essentially of, or consists of, alone or in combination with any other molecule or construct, a V_{H} region or portion thereof that has an amino acid deletion or substitution at one or more of amino acid positions 9, 10, 11, 12, 108, 110, and 112 of said V_{H} region. Amino acids may be substituted with either naturally-occuring or non-naturally occuring amino acids, or any other desired useful molecule.

[0136] Also described and claimed are uses of V_{H} proteins, or desired portions thereof, that comprise, consist essentially of, or consist of, alone or in combination with any other molecule or construct, a V_{H} region or portion thereof that has an amino acid deletion or substitution at one or more of amino acid positions 9, 10, 11, 12, 108, 110, and 112 of said V_{H} region. Such uses include uses in phage display, yeast display, and ribosome display systems and methods.

[0137] In yet another aspect, the invention includes a non-naturally occuring V_{L} protein, or a desired portion thereof, that comprises, consists essentially of, or consists of, alone or in combination with any other molecule, a V_{L} region or portion thereof that has an amino acid deletion or substitution at one or more of amino acid positions 12, 80, 81, 83, 105, 106, and 107 of said V_{L} region. Amino acids may be substituted with either naturally-occuring or non-naturally occuring amino acids, or any other desired useful molecule.

[0138] Also described and claimed are uses of V_{L} proteins, or desired portions thereof, that comprises, consists essentially of, or consists of, alone or in combination with any other molecule, a V_{L} region or portion thereof that has an amino acid deletion or substitution at one or more of amino acid positions 12, 80, 81, 83, 105, 106, and 107 of said V_{L} region. Such uses include uses in phage display, yeast display, and ribosome display systems and methods.

[0139] In yet another aspect, the invention includes a molecule comprising, consisting essentially of, or consisting of, (1) a V_{H} protein, or a desired portion thereof, wherein the V_{H} protein or portion thereof has an amino acid deletion or substitution at one or more of amino acid positions 9, 10, 11, 12, 108, 110, and 112, and (2) a non-naturally occuring V_{L} protein, or a desired portion thereof, alone or in combination with any other molecule, wherein the V_{L} protein or portion thereof has an amino acid deletion or substitution at one or more of amino acid positions 12, 80, 81, 83, 105, 106, and 107. Amino acids may be substituted with either naturally-occuring or non-naturally occuring amino acids, or any other desired useful molecule.

[0140] Also described and claimed are uses of a molecule comprising, consisting essentially of, or consisting of, (1) a V_{H} protein, or a desired portion thereof, wherein the V_{H} protein or portion thereof has an amino acid deletion or substitution at one or more of amino acid positions 9, 10, 11, 12, 108, 110, and 112, and (2) a non-naturally occuring V_{L} protein, or a desired portion thereof, alone or in combination with any other molecule, wherein the V_{L} protein or portion thereof has an amino acid deletion or substitution at one or more of amino acid positions 12, 80, 81, 83, 105, 106, and 107. Such uses include uses in phage display, yeast display, and ribosome display systems and methods.

[0141] The invention also includes molecular constructs wherein the binding domain is a single chain Fv and the heavy chain variable region of said single chain Fv has an amino acid substitution at amino acid position 11. The amino acid substituted for the amino acid at position of 11 of the single chain Fv heavy chain variable region may be selected from the group consisting of serine, threonine, tyrosine, asparagine, glutamine, aspartic acid, glutamic acid, lysine, arginine, and histidine. The invention thus includes, for example, a construct wherein the binding domain is a single chain Fv and the heavy chain variable region of said single chain Fv has a serine amino acid substitution at amino acid position 11. Other amino acid position changes, substitutions, and deletions, are noted herein.

[0142] The invention also includes, for example, a construct wherein the binding domain is a single chain Fv and the amino acid at position 10 and/or 11 of the heavy chain variable region of said single chain Fv has been deleted.

[0143] In another aspect, the invention includes constructs wherein the binding region binds to a tumor or tumor-associated antigen. The binding region of a construct of the invention may bind, for example, to a cancer cell antigen. Cancer cell antigens to which constructs of the invention bind include cancer cell surface antigens and intracellular cancer cell antigens.

[0144] In yet another aspect, the invention includes a construct wherein the binding regoin binds to an antigen on an immune effector cell.

[0145] In another aspect, the invention includes a construct wherein the binding region binds to a B cell antigen including, for example, a B cell antigen selected from the group consisting of CD19, CD20, CD22, CD37, CD40, CD80, and CD86. Constructs of the invention that bind to such B cell antigens include, for example, binding regions comprising an single chain Fv. Examples of such single chain Fv binding regions include molecules comprising or consisting essentially of single chain Fvs selected from the group consisting of HD37 single chain Fv, 2H7 single chain Fv, G28-1 single chain Fv, and 4.4.220 single chain Fv. Other examples include a binding region comprising, consisting essentially of, or consisting of, an extracellular domain of CTLA-4.

[0146] In another aspect, the invention includes a construct wherein the binding region binds to a B cell differentiation antigen. B cell differentiation antigens include, for example, CD19, CD20, CD21, CD22, CD23, CD37, CD40, CD45RO, CD80, CD86, and HLA class II.

[0147] In another aspect, the invention includes a construct wherein the binding region binds to a target selected from the group consisting of CD2, CD3, CD4, CD5, CD6, CD8, CD10, CD11b, CD14, CD19, CD20, CD21, CD22, CD23, CD24, CD25, CD28, CD30, CD37, CD40, CD43, CD50 (ICAM3), CD54 (ICAMI), CD56, CD69, CD80, CD86, CD134 (OX40), CD137 (41BB), CD152 (CTLA-4), CD153 (CD30 ligand), CD154 (CD40 ligand), ICOS, L6, B7-H1, and HLA class II.

[0148] The invention also includes protein constructs having a binding region, a tail region, and a connecting region, wherein the protein construct is capable of existing in solution as a monomer or in substantially monomeric form.

[0149] The invention also includes protein constructs having a binding region, a tail region, and a connecting region, wherein the protein construct is capable of forming a complex comprising two or more of said protein constructs including, for example, wherein said complex is a dimer.

[0150] In another aspect, constructs of the invention are capable of participating in or inducing or eliciting or helping to induce or elicit, directly or indirectly, at least one immunological activity selected from the group consisting of antibody dependent cell-mediated cytotoxicity, complement-dependent cytotoxicity (or complement-mediated lysis), complement fixation, induction of apoptosis, induction of one or more biologically active signals, induction of one or more immune effector cells, activation of cellular differentiation, cellular activation, release of one or more biologically active molecules, and neutralization of an infectious agent or toxin.

[0151] In another aspect, binding constructs of the invention are capable of induction of biologically active signals by activation or inhibition of one or more molecules selected from the group consisting of protein kinases, protein phosphatases, G-proteins, cyclic nucleotides or other second messengers, ion channels, and secretory pathway components. Such biologically active molecules are, for example, proteases. Other biologically active molecules are, for example, cytokines, including by way of example monokines, lymphokines, chemokines, growth factors, colony stimulating factors, interferons, and interleukins.

[0152] In another aspect, constructs of the invention are capable of induction, or participation in the induction, of one or more immune effector cells selected from the group consisting of NK cells, monocytes, macrophages, B cells, T cells, mast cells, neutrophils, eosinophils, and basophils.

[0153] In another aspect, constructs of the invention are capable of induction, or participation in the induction, of one or more immune effector cells that results in antibody dependent cell-mediated cytotoxicity or the release of one or more biologically active molecules.

[0154] In another aspect, constructs of the invention are capable of participating in and/or initiating apopotosis within target cells, for example, by activating one or more signalling mechanisms or molecules.

[0155] In another aspect, constructs of the invention are capable of induction, or participation in the induction, of cellular activation, wherein said activation leads to changes in cellular transcriptional activity. In one embodiment, cellular transcriptional activity is increased. In another embodiment, cellular transcriptional activity is decreased.

[0156] In another aspect, constructs of the invention having tail regions comprising, consisting essentially of, or consisting of, constant regions from IgA or IgE molecules, are capable of induction, or participation in the induction, of degranulation of neutrophils and/or mast cells.

[0157] In another aspect, constructs of the invention are capable of promotion, or participation in the promotion, of neutralization of an infectious agent, wherein said infectious agent is, for example, a bacterium, a virus, a parasite, or a fungus.

[0158] In another aspect, constructs of the invention are capable of promoting, or participating in the promotion of, neutralization of a toxin, wherein said toxin is selected from the group consisting of endotoxins and exotoxins. Such toxins include, for example, exotoxins selected from the group consisting of anthrax toxin, cholera toxin, diphtheria toxin, pertussis toxin, E. coli heat-labile toxin LT, E. coli heat stable toxin ST, shiga toxin Pseudomonas Exotoxin A, botulinum toxin, tetanus toxin, Bordetella pertussis AC toxin, and Bacillus anthracis EF toxin. Other toxins include, for example, saxitoxins, tetrodotoxin, mushroom toxins (amatoxins, gyromitrin, orellanine, etc.), aflatoxins, pyrrolizidine alkaloids, phytohemagglutinins, and grayanotoxins.

[0159] In another aspect, constructs of the invention are capable of binding to an intracellular target to, for example, effect (or participate in effecting) a cellular function. Such constructs include, for example, constructs that include a tail region comprising, consisting essentially of, or consisting of, a native or engineered IgA CH2 domain region and a native or engineered IgA CH3 domain region, said tail region being capapble of binding J chain. Such a tail region is found, for example, in the 2H7 scFv IgAH WlgACH2 WCH3+JChain construct. Thus, the invention includes constructs having, for example, an “Anti-Intracellular Target” binding domain (for example, and “Anti-Intracellular Target” scFv), a connecting region, and a native or engineered IgA constant region capable of binding J chain (for example, WlgACH2 WCH3).

[0160] In still another aspect, constructs of the invention include a molecule wherein an N-terminally immunoglobulin heavy chain constant region polypeptide comprises an IgG CH2 constant region polypeptide attached to an immunoglobulin heavy chain IgG CH3 constant region polypeptide.

[0161] In yet another aspect, the invention includes a method of reducing a target cell population in a subject comprising administering to said subject a therapeutically effective amount of a protein molecule that is less than about 120 kK, or less than about 150 kD, as measured, for example, by HPLC and non-reducing gels and consists essentially of (a) a first protein or peptide molecule that is capable of binding to cells within said target cell population, and (b) a second protein or peptide molecule that is capable of (i) binding to an Fc receptor and/or (ii) inducing target cell apoptosis, and/or (iii) fixing complement, wherein said first protein or peptide molecule is directly connected to said second protein or peptide molecule, or, optionally, said first protein or peptide molecule and said second protein or peptide molecule are linked by a third protein or peptide molecule, wherein said protein molecule is not an antibody, a member of the TNF family or the TNF receptor family, and is not conjugated with a bacterial toxin, a cytotoxic drug, or a radioisotope.

[0162] Various specific constructs of the invention include, by way of example only, the following:
[0163] 1. 2H7 scFv V_{H} L11S (CSC-S)H WCH2 WCH3
[0164] 2. 2H7 scFv V_{H} L11 S IgE CH2 CH3 CH4
[0165] 3. 2H7 scFv V_{H} L11S mIgE CH2 CH3 CH4
[0166] 4. 2H7 scFv V_{H} L11S mIgAH WIgACH2 T4CH3
[0167] 5. 2H7 scFv V_{H} L11S(SSS-S)H K322S CH2 WCH3
[0168] 6. 2H7 scFv V_{H} L11S (CSS-S)H K322S CH2 WCH3
[0169] 7. 2H7 scFv V_{H} L11S (SSS-S)H P331S CH2 WCH3
[0170] 8. 2HU scFv V_{H} L11S(CSS-S)H P331S CH2 WCH3
[0171] 9. 2H7 scFv V_{H} L11S (SSS-S)H T256N CH2 WCH3
[0172] 10. 2H7 scFv V_{H} L11S (SSS-S)H RTPE/QNAK (255-258) CH2 WCH3
[0173] 11. 2H7 scFv V_{H} L11S (SSS-S)H K290Q CH2 WCH3
[0174] 12. 2H7 scFv V_{H} L11S (SSS-S)H A339P CH2 WCH3
[0175] 13. G28-1 scFv (SSS-S)H WCH2 WCH3
[0176] 14. G28-1 scFv IgAH WCH2 WCH3
[0177] 15. G28-1 scFv V_{H} L11S (SSS-S)H WCH2 WCH3
[0178] 16. G28-1 scFv V_{H} L11S (CSS-S)H WCH2 WCH3
[0179] 17. G28-1 scFv V_{H} L11S (CSC-S)H WCH2 WCH3
[0180] 18. G28-1 scFv V_{H} L11S (SSC-P)H WCH2 WCH3
[0181] 19. CTLA4 (SSS-S)H P238SCH2 WCH32
[0182] 20. CTLA4 (CCC-P) WH WCH2 WCH3
[0183] 21. FC2-2 scFv (SSS-S)H WCH2 WCH3
[0184] 22. FC2-2 scFv VHL11S (SSS-S)H WCH2 WCH3
[0185] 23. UCHL-1 scFv (SSS-S)H WCH2 WCH3
[0186] 24. UCHL-1 scFv LV_{H}11S (SSS-S)H WCH2 WCH3
[0187] 25. 5B9 scFv (SSS-S)H WCH2 WCH3
[0188] 26. 5B9 scFv VHL11S (SSS-S)H WCH2 WCH3
[0189] 27. 2H7 scFv (SSS-S)H WCH2 WCH3
[0190] 28. 2H7 scFv (SSS-S)H P238SCH2 WCH3
[0191] 29. 2H7 scFv IgAH WCH2 WCH3
[0192] 30. 2H7 scFv IgAH WIgACH2 T4CH3
[0193] 31. 2H7 scFv IgAH WIgACH2 WCH3+JChain
[0194] 32. 2H7 scFv (CCC-P) WH WCH2 WCH3
[0195] 33. 2H7 scFv (SSS-S)H WCH2 F405YCH3
[0196] 34. 2H7 scFv (SSS-S)H WCH2 F405aCH3
[0197] 35. 2H7 scFv (SSS-S)H WCH2 Y407ACH3
[0198] 36. 2H4 scFv (SSS-S) HWCH2 F405a, Y407ACH3
[0199] 37. 2H7 scFv (CSS-S)H WCH2 WCH3
[0200] 38. 2H7 scFv (SCS-S)H WCH2 WCH3
[0201] 39. 2H7 scFv (SSC-P)H WCH2 WCH3
[0202] 40. 2H7 scFv (CSC-S)H WCH2 WCH3
[0203] 41. 2H7 scFv (CCS-P)H WCH2 WCH3
[0204] 42. 2H7 scFv (SCC-P)H WCH2 WCH3
[0205] 43. 2H7 scFv VH L11S (SSS-S)H WCH2 WCH3
[0206] 44. 2H7 scFv VH L11S (CSS-S)H WCH2 WCH3
[0207] 45. G28-1 scFv VH L11S (SCS-S)H WCH2 WCH3
[0208] 46. G28-1 scFv VH L11S (CCS-P)H WCH2 WCH3
[0209] 47. G28-1 scFv VH L11S (SCC-P)H WCH2 WCH3
[0210] 48. G28-1 scFv VH L11S migE CH2 CH3 CH4
[0211] 49. G28-1 scFv VH L11S mIgAH WIgACH2 T4CH3
[0212] 50. G28-1 scFv VH L11S hIgE CH2 CH3 CH4
[0213] 51. G28-1 scFv VH L11S hIgAH WIgACH2 T4CH3
[0214] 52. HD37 scFv IgAH WCH2 WCH3
[0215] 53. HD37 scFv (SSS-S)H WCH2 WCH3
[0216] 54. HD37 scFv VH L11S(SSS-S)H WCH2 WCH3
[0217] 55. L6 scFv IgAH WCH2 WCH3
[0218] 56. L6 scFv LV_{H}11S (SSS-S)H WCH2 WCH3
[0219] 57. 2H7 scFv-llama IgG1
[0220] 58. 2H7 scFv-llama IgG2
[0221] 59. 2H7 scFv-llama IgG3
[0222] 60. CD16-6 low (ED)(SSS-S)H P238SCH2 WCH3
[0223] 61. CD16-9 high (ED)(SSS-S)H P238SCH2 WCH3
[0224] 62. 2e12 scFv (SSS-s)H P238SCH2 WCH3—hCD80TM/CT
[0225] 63. 10A8 scFv (SSS-s)H P238SCH2 WCH3—hCD80TM/CT
[0226] 64.40.2.36 scFv (SSS-s)H P238SCH2 WCH3—hCD80TM/CT
[0227] 65. 2H7 scFv (SSS-s)H P238SCH2 WCH3—hCD80TM/CT
[0228] 66. G19-4 scFv (SSS-s)H P238SCH2 WCH3—hCD80TM/CT
[0229] 67. 2e12 scFv (SSS-s)H WCH2 WCH3—hCD80TM/CT
[0230] 68. 2e12 scFv IgAH IgACH2 T4CH3—hCD80TM/CT
[0231] 69. 2e12 scFv IgE CH2CH3CH4—hCD80TM/CT
[0232] 70. 2e12 scFv (SSS-s)H P238SCH2 WCH3—mFADD-TM/CT
[0233] 71. 2e12 scFv (SSS-s)H WCH2 WCH3—mFADD-TM/CT
[0234] 72. 2e12 scFv (SSS-s)H WCH2 WCH3—mcasp3-TM/CT
[0235] 73. 2e12 scFv (SSS-s)H P238SCH2 WCH3—mcasp3-TM/CT
[0236] 74. 2e12 scFv (SSS-s)H WCH2 WCH3—mcasp8-TM/CT
[0237] 75. 2e12 scFv (SSS-s)H P238SCH2 WCH3—mcasp8-TM/CT
[0238] 76. 2e12 scFv (SSS-s)H WCH2 WCH3—hcasp3-TM/CT
[0239] 77. 2e12 scFv (SSS-s)H P238SCH2 WCH3—hcasp3-TM/CT
[0240] 78. 2e12 scFv (SSS-s)H WCH2 WCH3—hcasp8-TM/CT
[0241] 79. 2e12 scFv (SSS-s)H P238SCH2 WCH3—hcasp8-TM/CT
[0242] 80. 1D8 scFv-hIgG1 (SSS-s)H P238SCH2 WCH3—hCD80TM/CT
[0243] 81. 1D8 scFv-hIgG1 (SSS-s)H WCH2 WCH3—hCD80TM/CT
[0244] 82. 1D8 scFv-mIgAT4—hCD80TM/CT
[0245] 83. 1D8 scFv-hIgE—hCD80TM/CT
[0246] 84. 1D8 scFv-hIgG1 (SSS-s)H P238SCH2 WCH3—mFADD-TM/CT
[0247] 85. 1D8 scFv-hIgG1 (SSS-s)H WCH2 WCH3—mFADD-TM/CT
[0248] 86. 1D8 scFv-hIgG1 (SSS-s)H WCH2 WCH3—mcasp3-TM/CT
[0249] 87. 1D8 scFv-hIgG1 (SSS-s)H P238SCH2 WCH3—mcasp3-TM/CT
[0250] 88. 1D8 scFv-hIgG1 (SSS-s)H WCH2 WCH3—mcasp8-TM/CT
[0251] 89. 1D8 scFv-hIgG1 (SSS-s)H P238SCH2 WCH3—mcasp8-TM/CT
[0252] 90. 1D8 scFv-hIgG1 (SSS-s)H WCH2 WCH3—hcasp3-TM/CT
[0253] 91. 1D8 scFv-hIgG1 (SSS-s)H P238SCH2 WCH3—hcasp3-TM/CT
[0254] 92. 1D8 scFv-hIgG1 (SSS-s)H WCH2 WCH3—hcasp8-TM/CT
[0255] 93. 1D8 scFv-hIgG1 (SSS-s)H P238SCH2 WCH3—hcasp8-TM/CT L6 scFv (SSS-S)H WCH2 WCH3
[0256] 94. 2H7 scFv CD1 54 (L2)
[0257] 95. 2H7 scFv CD154 (S4)
[0258] 96. CTLA4 IgAH IGACH2CH3
[0259] 97. CTLA4 IgAH IgACH2 T4CH3
[0260] 98. 2H7 scFv IgAH IgACH2CH3
[0261] 99. 2H7 scFv IgAH IgAHCH2 TI 8CH3
[0262] 100. 2H&-40.2.220 scFv (SSS-S)H WCH2 WCH3 (bispecific anti-ccd20-anti-cd40)
[0263] 101. 2H7 scFv IgAH IgACH2 T4CH3-hCD89 TM/CT
[0264] 102. G19-4 scFv (CCC-P) WH WCH2 WCH3-hCD89 TM/CT
[0265] 103. 2e12 scFv (CCC-P) WH WCH2 WCH3-hCD89 TM/CT

[0266] These and other aspects of the present invention will become further apparent upon reference to the following detailed description and attached drawings. As noted herein, all referenced patents, articles, documents, and other materials disclosed or identified herein are hereby incorporated by reference in their entireties as if each was incorporated individually.

### BRIEF DESCRIPTION OF THE DRAWINGS

[0267] FIG. 1 shows DNA and deduced amino acid sequences [SEQ ID NOS:______]of 2H7scFv-Ig, a binding domain-immunoglobulin fusion protein capable of specifically binding CD20.

[0268] FIG. 2 shows production levels of 2H7 scFv-Ig by transfected, stable CHO lines and generation of a standard curve by binding of purified 2H7 scFv-Ig to CHO cells expressing CD20.

[0269] FIG. 3 shows SDS-PAGE analysis of multiple preparations of isolated 2H7scFv-Ig protein.

[0270] FIG. 4 shows complement fixation (FIG. 4A) and mediation of antibody-dependent cellular cytotoxicity (FIG. 4B) by 2H7scFv-Ig.

[0271] FIG. 5 shows the effect of simultaneous ligation of CD20 and CD40 on growth of normal B cells.

[0272] FIG. 6 shows the effect of simultaneous ligation of CD20 and CD40 on CD95 expression and induction of apoptosis in a B lymphoblastoid cell line.

[0273] FIG. 7 shows DNA and deduced amino acid sequences [SEQ ID NOS:______] of 2H7scFv-CD154 L2 (FIG. 7A, SEQ ID NOS:______) and 2H7scFv-CD154 S4 (FIG. 7B, SEQ ID NOS:______) binding domain-immunoglobulin fusion proteins capable of specifically binding CD20 and CD40.

[0274] FIG. 8 shows binding of 2H7scFv-CD154 binding domain-immunoglobulin fusion proteins to CD20+CHO cells by flow immunocytofluorimetry.

[0275] FIG. 9 shows binding of Annexin V to B cell lines Ramos, BJAB, and T51 after binding of 2H7scFv-CD 154 binding domain-immunoglobulin fusion protein to cells.

[0276] FIG. 10 shows effects on proliferation of B cell line T51 following binding of 2H7scFv-CD 154 binding domain-immunoglobulin fusion protein.

[0277] FIG. 11 depicts schematic representations of the structures of 2H7ScFv-Ig fusion proteins [SEQ ID NOS:______] referred to as CytoxB or CytoxB derivatives: CytoxB-MHWTG1C (2H7 ScFv, mutant hinge, wild-type human IgG1 Fc domain), CytoxB-MHMG1C (2H7 ScFv, mutant hinge, mutated human IgG1 Fc domain) and CytoxB-IgAHWTHG1C (2H7 ScFv, human IgA-derived hinge [SEQ ID NO:______], wild-type human IgG1 Fc domain). Arrows indicate position numbers of amino acid residues believed to contribute to FcR binding and ADCC activity (heavy arrows), and to complement fixation (light arrows). Note absence of interchain disulfide bonds.

[0278] FIG. 12 shows SDS-PAGE analysis of isolated CytoxB and 2H7scFv-CD 154 binding domain-immunoglobulin fusion proteins.

[0279] FIG. 13 shows antibody dependent cell-mediated cytotoxicity activity of CytoxB derivatives.

[0280] FIG. 14 shows complement dependent cytotoxicity of CytoxB derivatives.

[0281] FIG. 15 shows serum half-life determinations of CytoxB-MHWTG1C in macaque blood samples.

[0282] FIG. 16 shows effects of CytoxB-MHWTG1C on levels of circulating CD40+B cells in macaque blood samples.

[0283] FIG. 17 shows production levels of HD37 (CD19-specific) ScFv-Ig by transfected mammalian cell lines and generation of a standard curve by binding of purified HD37 ScFv-Ig to cells expressing CD19.

[0284] FIG. 18 shows production levels of L6 (carcinoma antigen) ScFv-Ig by transfected, stable CHO lines and generation of a standard curve by binding of purified L6 ScFv-Ig to cells expressing L6 antigen.

[0285] FIG. 19 shows antibody dependent cell-mediated cytotoxicity activity of binding domain-immunoglobulin fusion proteins 2H7 ScFv-Ig, HD37 ScFv-Ig and G28-1 (CD37-specific) ScFv-Ig.

[0286] FIG. 20 shows antibody dependent cell-mediated cytotoxicity activity of L6 ScFv-Ig fusion proteins.

[0287] FIG. 21 shows SDS-PAGE analysis of L6 ScFv-Ig and 2H7 ScFv-Ig fusion proteins.

[0288] FIG. 22 shows SDS-PAGE analysis of G28-1 ScFv-Ig and HD37 ScFv-Ig fusion proteins.

[0289] FIG. 23 presents a sequence alignment of immunoglobulin hinge and CH2 domains of human IgG1 (SEQ ID NO:______) with the hinge and CH2 domains of llama IgG1 (SEQ ID NO:______), IgG2 (SEQ ID NO:______), and IgG3 (SEQ ID NO:______).

[0290] FIG. 24 illustrates migration of purified 2H7 scFv llama IgG fusion proteins in a 10% SDS polyacrylamide gel. Purified fusion proteins (5 μg per sample) were prepared in non-reducing sample buffer (lanes 2-5) and in reducing sample buffer (lanes 6-9). Lane 1: molecular weight markers (non-reduced); lanes 2 and 6: 2H7 scFv-llama IgG1 (SEQ ID NO:______); Lanes 3 and 7: 2H7 scFv-llama IgG2 (SEQ ID NO:______): lanes 4 and 8: 2H7 scFv-llama IgG3 (SEQ ID NO:______; and Lanes 5 and 9: Rituximab (chimeric anti-CD20 antibody (human IgG1 constant region)).

[0291] FIG. 25 shows binding of 2H7 scFv-llama IgG1 (SEQ ID NO:______), 2H7 scFv-llama IgG2 (SEQ ID NO:______), and 2H7 scFv-llama IgG3 (SEQ ID NO:______) to CD20+CHO cells detected by flow immunocytofluorimetry.

[0292] FIG. 26 depicts CDC activity of 2H7 scFv llama IgG fusion proteins, 2H7 scFv-llama IgG1 (SEQ ID NO:______, 2H7 scFv-llama IgG2 (SEQ ID NO:______), and 2H7 scFv-llama IgG3 (SEQ ID NO:______), and 2H7 scFv human IgG1 (2H7 scFv IgG WTH WTCH2CH3) (SEQ ID NO:______) against BJAB cells in the presence of rabbit complement. Rituximab was included as a control.

[0293] FIG. 27 shows antibody dependent cell-mediated cytotoxicity activity of 2H7 scFv llama IgG fusion proteins, 2H7 scFv-llama IgG1 (SEQ ID NO:______), 2H7 scFv-llama IgG2 (SEQ ID NO:______), and 2H7 scFv-llama IgG3 (SEQ ID NO:______). Effector cells (human PBMC) were combined with target cells (BJAB cells) at three different ratios, 1:25, 1:50, and 1:100. Rituximab was included as a control. Each data point represents three separate measurements.

[0294] FIG. 28 shows antibody dependent cell-mediated cytotoxicity activity of 2H7 scFv llama IgG fusion proteins, 2H7 scFv-llama IgG1 (SEQ ID NO:______), 2H7 scFv-llama IgG2 (SEQ ID NO:______), and 2H7 scFv-llama IgG3 (SEQ ID NO:______). Effector cells (llama PBMC) were combined with target cells (BJAB cells) at three different ratios, 1:25, 1:50, and 1:100. Rituximab was included as a control. Each data point represents three separate measurements.

[0295] FIG. 29 depicts complement dependent cytotoxicity activity of Reh cells (acute lymphocytic leukemia) expressing scFv-Ig fusion proteins on the cell surface. Reh cells were transfected with constructs encoding scFv antibodies specific for human costimulatory molecules, CD152, CD28, CD40, and CD20, fused to human IgG1 wild-type hinge-CH2-CH3, which was fused to human CD80 transmembrane and cytoplasmic tail domains. Complement dependent cytotoxicity activity was measured in the presence and absence of rabbit complement (plus C′ and no C′, respectively). The data represent the average of duplicate samples. Reh anti-hCD 152 scFvIg: Reh cells transfected with polynucleotide 10A8 scFv IgG MTH (SSS) MT CH2CH3 (SEQ ID NO:______); Reh anti-hCD28scFvIg: 2E12 scFv IgG MTH (SSS) MT CH2CH3 (SEQ ID NO:______); Reh anti-hCD40scFvIg: 4.2.220 scFv IgG MTH (SSS) MT CH2CH3 (SEQ ID NO:______); and Reh anti-hCD20scFvIg: 2H7 scFv IgG MTH (SSS) MT CH2CH3 (SEQ ID NO:______).

[0296] FIG. 30 presents antibody dependent cell-mediated cytotoxicity activity of Reh cells that were transfected with constructs encoding scFv antibodies specific for human costimulatory molecules, CD152, CD28, CD40, and CD20, as described for FIG. 29, and for murine CD3, fused to human mutant IgG1 hinge and mutant CH2 and wild type CH3 (Reh anti-mCD3scFv designating Reh cells transfected with polynucleotide 500A2 scFv IgG MTH (SSS) MTCH2WTCH3 SEQ ID NO:______)), which was fused to human CD80 transmembrane and cytoplasmic tail domains. The data represent the average of quadruplicate samples.

[0297] FIG. 31 lists immunoglobulin constant region constructs that were used in experiments illustrated in subsequent figures.

[0298] FIG. 32 depicts complement dependent cytotoxicity activity of CTLA-4 Ig fusion proteins, CTLA-4 IgG WTH (CCC) WTCH2CH3 (SEQ ID NO:______) (2 μg/ml) and CTLA-4 IgG MTH MTCH2WTCH3 (SEQ ID NO:______) (2 μg/ml), in the presence and absence of rabbit complement (plus C′ and no C′, respectively). The target cells were Reh cells and Reh cells transfected with CD80 (Reh CD80.10).

[0299] FIG. 33 shows antibody dependent cell-mediated cytotoxicity activity of CTLA-4 Ig fusion proteins, CTLA-4 IgG WTH (CCC) WTCH2CH3 (SEQ ID NO:______) (2 μg/ml) and CTLA-4 IgG MTH MTCH2WTCH3 (SEQ ID NO:______) (2 μg/ml). Effector cells, human PBMC, were added to target cells, Reh or Reh CD80.1, at the ratios indicated. FIG. 33A presents the level of natural killing in Reh CD80. 1 cells in the absence of any Ig fusion protein. FIG. 33B presents antibody dependent cell-mediated cytotoxicity mediated by CTLA-4 IgG MTH MTCH2WTCH3, and FIG. 33C presents antibody dependent cell-mediated cytotoxicity mediated by CTLA-4 IgG WTH (CCC) WTCH2CH3. Each data point represents the average percent specific killing measured in four sample wells.

[0300] FIG. 34 illustrates binding of 2H7 (anti-CD20) scFv Ig fusion proteins to (CD20+) CHO cells by flow immunocytofluorimetry.

[0301] FIG. 35 presents an immunoblot of 2H7 scFv IgG and IgA fusion proteins. COS cells were transiently transfected with various 2H7 scFv Ig fusion protein constructs. The expressed polypeptides were immune precipitated with protein A, separated in a non-reducing SDS polyacrylamide gel, and then transferred to a polyvinyl fluoride membrane. Proteins were detected using an anti-human IgG (Fc specific) horseradish peroxidase conjugate. Lane 1: vector only; lane 2: 2H7 scFv IgG WTH (CCC) WTCH2CH3 (SEQ ID NO:______); lane 3: 2H7 scFv IgG MTH (CSS) WTCH2CH3 (SEQ ID NO:______); lane 4: 2H7 scFv IgG MTH (SCS) WTCH2CH3 (SEQ ID NO:______); lane 5: 2H7 scFv IgAH IgG WTCH2CH3 (SEQ ID NO:______); and lane 6: 2H7 scFv IgG MTH (SSS) WTCH2CH3 (SEQ ID NO:______).

[0302] FIG. 36 illustrates binding of 2H7 scFv IgAH IgACH2CH3 polypeptide (SEQ ID NO:______) and 2H7 scFv IgAH IgAT4 (SEQ ID NO:______) to (CD20+) CHO cells by flow immunocytofluorimetry. The source of the polypeptides was culture supernatants from transiently transfected COS cells. COS cells transfected with a plasmid comprising a sequence encoding 2H7 scFv IgAH IgACH2CH3 were co-transfected with a plasmid containing nucleotide sequence encoding human J chain.

[0303] FIG. 37 illustrates antibody dependent cell-mediated cytotoxicity activity of anti-CD20 (2H7) scFv Ig fusion proteins against BJAB target cells using whole blood as the source of effector cells. Purified 2H7 scFv Ig fusion proteins were titrated and combined with ⁵¹Cr-labeled BJAB cells (5×10⁴) and whole blood (1:4 final dilution). Each data point represents the average percent specific killing measured in four sample wells.

[0304] FIG. 38 demonstrates antibody dependent cell-mediated cytotoxicity activity of 2H7 scFv Ig fusion proteins (5 μg/ml) against ⁵¹Cr-labeled BJAB cells at 0.25, 0.125, and 0.625 dilutions of whole blood. Each data point represents the average percent specific killing measured in four sample wells.

[0305] FIG. 39 shows a comparison of antibody dependent cell-mediated cytotoxicity activity of 2H7 scFv IgG MTH (SSS) WTCH2CH3 (5 μg/ml) and 2H7 scFv IgAH IgACH2CH3 (5 μg/ml) when human PBMC are the source of effector cells (FIG. 39A) and when human whole blood is the source of effector cells (FIG. 39B).

[0306] FIG. 40 presents an immunoblot of 2H7 scFv IgG fusion proteins. COS cells were transiently transfected with various 2H7 scFv Ig fusion protein constructs. Culture supernatants containing the expressed polypeptides were separated in a non-reducing SDS polyacrylamide gel, and then were transferred to a polyvinyl fluoride membrane. Proteins were detected using an anti-human IgG (Fc specific) horseradish peroxidase conjugate. Lanes 1-5: purified 2H7 scFv IgG MTH (SSS) WTCH2CH3 at 40 ng, 20 ng, 10 ng/5 ng, and 2.5 ng per lane, respectively. Culture supernatants were separated in lanes 6-9. Lane 6: 2H7 scFv IgG WTH (CCC) WTCH2CH3; lane 7: 2H7 scFv IgG MTH (CSS) WTCH2CH3; lane 8: 2H7 scFv IgG MTH (SCS) WTCH2CH3; and lane 9: 2H7 scFv VHSER11 IgG MTH (SSS) WTCH2CH3. The molecular weight (kDal) of marker proteins is indicated on the left side of the immunoblot.

[0307] FIG. 41 illustrates cell surface expression of 1D8 (anti-murine 4-1BB) scFv IgG WTH WTCH2CH3—CD80 fusion protein on K1735 melanoma cells by flow immunofluorimetry (FIG. 41A). The scFv fusion protein was detected with phycoerythrin-conjugated F(ab′)₂ goat anti-human IgG. FIG. 41B depicts growth of tumors in naive C3H mice transplanted by subcutaneous injection with wild type K1735 melanoma cells (K1735-WT) or with K1735 cells transfected with 1D8 scFv IgG WTH WTCH2CH3-CD80 (K1735-1D8). Tumor growth was monitored by measuring the size of the tumor. FIG. 41C demonstrates the kinetics of tumor growth in naive C3H mice injected intraperitoneally with monoclonal antibodies to remove CD8⁺, CD4⁺, or both CD4⁺ and CD8⁺ T cells prior to transplantation of the animals with K1735-1D8 cells.

[0308] FIG. 42 demonstrates therapy of established K1735-WT tumors using K1735-1D8 as an immunogen. Six days after mice were transplanted with K1735-WT tumors, one group (five animals) was injected subcutaneously with K1735-1D8 cells (open circles) or irradiated K1735-WT cells (solid squares) on the contralateral side. A control group of mice received PBS (open squares). Treatments were repeated on the days indicated by the arrows.

[0309] FIG. 43 shows the growth of tumors in animals that were injected subcutaneously with 2×10⁶ K1735-WT cells (solid squares) and the growth of tumors in animals that were injected subcutaneously with 2×10⁶ K1735-WT cells plus 2×10⁵ K1735-1D8 cells (open triangles).

[0310] FIG. 44 presents a flow cytometry analysis of antigen 104 murine sarcoma tumor cells transfected with 1D8 scFv IgG WTH WTCH2CH3-CD80 isolated after repeated rounds of panning against anti-human IgG. Transfected cells expressing 1D8 scFv IgG WTH WTCH2CH3-CD80 were detected with fluoroisothiocyanate (FITC)-conjugated goat anti-human IgG (depicted in black). Untransfected cells are shown in gray.

[0311] FIG. 45 illustrates migration of various 2H7 scFv Ig fusion proteins in a 10% SDS-PAGE gel. 2H7 was the anti-CD20 scFv and 40.2.220 was the anti-CD40 scFv. Lane 1: Bio-Rad prestained molecular weight standards; lane 2: anti-CD20 scFv IgG MTH (SSS) MTCH2WTCH3; lane 3: anti-CD20 scFv IgG MTH (SSS) WTCH2CH3; lane 4: 2H7 scFv IgAH IgG WTCH2CH3; lane 5: anti-CD20-anti-CD40 scFv IgG MTH (SSS) MTCH2WTCH3; lane 6: Rituximab; lane 7: Novex Multimark® molecular weight standards.

[0312] FIG. 46 illustrates effector function as measured in an antibody dependent cell-mediated cytotoxicity assay of 2H7 Ig fusion proteins that contain a mutant CH2 domain or wild type CH2 domain. The percent specific killing of BJAB target cells in the presence of human PBMC effector cells by 2H7 scFv IgG MTH (SSS) MTCH2WTCH3 (diamonds) was compared to 2H7 scFv IgG MTH (SSS) WTCH2CH3 (squares) and 2H7 scFv IgAH IgG WTCH2CH3 (triangles) and Rituximab (circles).

[0313] FIG. 47 shows cell surface expression of an anti-human CD3 scFv IgG WTH WTCH2CH3—CD80 (SEQ ID NO:______) fusion protein on Reh cells (FIG. 47A) and T51 lymphoblastoid cells (FIG. 47B) by measuring the linear fluorecent equivalent (LFE) using flow immunocytofluorimetry.

[0314] FIG. 48 presents the percent specific killing of untransfected Reh and T51 cells and the percent specific killing of Reh cells (Reh anti-hCD3) (FIG. 48A) and T51 cells (T51 anti-hCD3) (FIG. 48B) that were transfected with a construct encoding scFv antibodies specific for human CD3, fused to human IgG1 wild-type hinge-CH2-CH3, which was fused to human CD80 transmembrane and cytoplasmic tail domains (anti-human CD3 scFv IgG WTH WTCH2CH3-CD80 (SEQ ID NO:______). Human PBMC (effector cells) were combined with BJAB target cells at the ratios indicated.

[0315] FIG. 49 illustrates binding of 5B9, an anti-murine CD137 (4-1 BB) monoclonal antibody, and a 5B9 scFv IgG fusion protein (5B9 scFv IgG MTH (SSS) WTCH2CH3 (SEQ ID NO:______) to stimulated human PBMC. Binding of the 5B9 scFv IgG fusion protein was detected by flow immunocytofluorimetry using FITC conjugated goat anti-human IgG. Binding of the 5B9 monoclonal antibody was detected with FITC conjugated goat anti-mouse IgG.

[0316] FIG. 50 illustrates the effect of the LV_{H}11S mutation on the expression of 2H7 LV_{H}11S scFv WCH2 WCH3 (“CytoxB scFv Ig”; SEQ ID NO:______) in CHO cell lines.

[0317] FIG. 51 shows a semi-quantitative SDS-PAGE analysis examining the expression of 2H7 LV_{H}11S scFv WCH2 WCH3 (SEQ ID NO:______) when transiently transfected in CHO cells. Lanes 2-5 are various amounts of 2H7 LV_{H}11S scFv WCH2 WCH3. Lanes 6-10 are 1001 samples from five different clones expressing 2H7 LV_{H}11S scFv WCH2 WCH3.

[0318] FIG. 52 shows differences in binding capacity between a G28-1 LV_{H}11S scFv Ig construct (SEQ ID NO:______) and a G28-1 wild type scFv Ig binding domain fusion protein construct (SEQ ID NO:______), both obtained from transiently transfected COS cells. Binding to Ramos cells was determined using flow cytometry. The data illustrates a significant increase in binding of the LV_{H}11S protein to CD37+Ramos cells.

[0319] FIG. 53 illustrates increased levels of expression of a G28-1 LV_{H}11S scFv Ig construct (SEQ ID NO:______) compared to a G28-1 wild type scFv Ig construct in COS. Protein levels were compared using immunoblot analysis. Both immunoblot gels have quantitated amounts of purified a G28-1 scFv Ig (SSS-S)H WCH2 WCH3 contruct of the invention in lanes 1-4. Lanes 5-9 of the first immunoblot represent five different clones each transfected with G28-1 scFv (SSS-S)H WCH2 WCH3, while lanes 5-9 of the second immunoblot represent five different clones transfected with G28-1 LV_{H}11S scFv (SSS-S)H WCH2 WCH3. The immunoblots illustrate that the LV_{H}11S form causes the G28-1 scFv Ig construct to express at very high levels.

[0320] FIG. 54 illustrates the binding of 2H7 scFv Ig derivatives with altered hinges (SEQ ID NOs:______,______,______,______,______,______,______,______) to CHO cells expressing CD20 (CD20+CHO) by flow cytometry, and indicates that these altered connecting region hinge constructs (including (SSS-S), (CSS-S), (SCS-S) and (CSC-S) hinge regions) retain binding function to CD20.

[0321] FIG. 55 shows the ability to mediate antibody dependent cell-mediated cytotoxicity of various constructs against Bjab targets: (A) 2H7 scFv Ig constructs of the invention that contain connecting regions comprising (CSS-S), (SCS-S), (CSC-S), and (SSS-S) hinges (SEQ ID NOs:______,______,______,______,______,______,______,______) and (B) 2H7 scFv constructs of the invention with various connecting regions and tail regions (SEQ ID NOs:______,______,______,______,______). Percent specific killing is compared to total killing induced by a detergent. The controls are natural killing in target cells with effectors added and a 2H7 construct with an IgA hinge connnecting region and IgA-derived tail region that does not bind PBMC effectors.

[0322] FIG. 56 illustrates the ability of various 2H7 scFv Ig constructs of the invention (SEQ ID NO:______,______,______,______,______) that include connecting regions having various hinge regions (e.g., (CSC-S), (SSS-S), (SCS-S), and (CSS-S)) to mediate complement activity in Ramos cells. Percent specific killing is measured against the control of complement only, and 100% killing was determined by exposure of cells to detergent.

[0323] FIG. 57 illustrates the shows the binding of 2H7 scFv Ig constructs of the invention containing different tail regions (SEQ ID NO:______,______,______) to CD20+CHO using immunocytofluroimetry. The different proteins were detected using FITC conjugated to anti-IgG, anti-IgA, and anti-IgE.

[0324] FIG. 58A shows the binding of 2H7 V_{H} L1 SscFv IgECH2CH3CH4, purified using Hydrophobic charge induction chromatography (HCIC) and eluted at different pHs 4.0 and 3.5, (SEQ ID NO:______) in CD20+CHO cells by flow cytometry, indicating that the proteins bound CD20 whether eluted at pH 4.0 or 3.5. FIG. 58B is a data graph indicating the ability of these 2H7 V_{H} L11S scFv IgE constructs of the invention to mediate, for example, ADCC in Bjab target cells.

[0325] FIG. 59 shows the binding capacity of G28-1 V_{H} L11S mIgECH2CH3CH4 (SEQ ID NO:______) (A) to Bjab and Ramos target cells and (B) to CD20+CHO cells by flow cytometry.

[0326] FIG. 60 shows the High Performance Liquid Chromatography (HPLC) profiles of various protein constructs of the invention (A) 2H7 scFv (SSS-S) H (P238S)CH2 WCH3 (SEQ ID NO: ______) (B) 2H7 scFv (CSS-S)H WCH2 WCH3, (SEQ ID NO: ______) (C) 2H7 scFv (SCS-S)H WCH2 WCH3, (SEQ ID NO: ______) and (D) 2H7 scFv (SSS-S)H WCH2 (Y407A)CH3 (SEQ ID NO: ______), indicating that construct A has apparent molecular weight forms of 100 kD and 75 kD and that, by introducing certain changes a predominant 75 kD molecular weight form is obtained, as seen in constructs B, C, and D. See Example 40.

[0327] FIG. 61 shows the HPLC profiles of various protein constructs of the invention (A) 2H7 scFv (SSS-S)H WCH2 WCH3, (SEQ ID NO: ______) (B) 2H7 scFv (CSC—S)H WCH2 WCH3, (SEQ ID NO: ______) (C) 2H7 scFv (CCC-P)H WCH2 WCH3, (SEQ ID NO: ______) and (D) 2H7 scFv IgAH WCH2 WCH3 (SEQ ID NO: b, indicating that construct A has apparent molecular weight forms of 100 kD and 75 kD and that, by introducing certain changes a predominant 75 kD molecular weight form is obtained, as seen in constructs B and C, while construct D (which has an IgA tail regaion) has an apparent molecular weight of 150 kD. See Example 40.

[0328] FIG. 62 shows the HPLC profiles of various protein constructs of the invention (A) 2H7 scFv (SSS-S)H WCH2 WCH3, (SEQ ID NO:______) (B) 2H7 scFv (SCS-S) H WCH2 WCH3, (SEQ ID NO:______) (C) 2H7 scFv IgA 3TCH2 WCH3, (SEQ ID NO: ______) and (D) 2H7 scFv (SSS-S)H WCH2 (F405a Y407A)CH3 (SEQ ID NO: ______), indicating that construct A has two forms with apparent molecular weights at 100 kD and 75 kD, construct B has a predominant form with an apparent molecular weight of 75 kD, while construct C with a T4 mutation leads to three forms with apparent molecular weights near 600 kD and construct D with a double point mutation in the CH3 region leads to a predominant form having an apparent molecular weight less than 44 kD. A T4 mutation here refers to a truncation of four amino acids from a CH3 region. See Example 40.

[0329] FIG. 63 compares the effect on binding CD20+CHO cells by 2H7. VH L11S scFv Ig constructs (SEQ ID NOs: ______,______), with and without F405a and Y407A alterations in the CH3 region, by flow cytometry, indicating a loss of binding capability with this double amino acid change. See Example 41.

[0330] FIG. 64 shows the binding capacity of FITC conjugated 2H7 V_{H} L11S scFv Ig derivatives (SEQ ID NOs: ______,______,______,______, to CH₂O+CHO cells by flow cytomerty, indicating that these constructs do not lose binding capacity when conjugated to a florescent marker. See Example 41.

[0331] FIG. 65 shows a nonreducing SDS-PAGE analysis examining 10 fg (per lane) of various purified 2H7 V_{H} L11S scFv Ig constructs of the invention (SEQ ID NOs: ______, ______, ______, ______, ______, ______), indicating an apparent molecular weight for each construct in reference to a standard molecular weight marker in lane 1. See Example 41.

[0332] FIG. 66 compares the CH2 domain sequences of four different human IgG regions, hIgG1, hIgG2, hIgG3, hIgG4, hIgG4, and one rat region, rIgG2b. Point mutations affecting ADCC and CDC are labeled with arrows. See Example 52.

[0333] FIG. 67 demonstrates the ability of various 2H7 VH L11S scFv Ig constructs (SEQ ID NOs: ______,______) to mediate ADCC in CHO and Lec13 CHO transiently transfected cells, indicating that constructs expressed in Lec 13 CHO cells had a 20% increase in specific killing over the same construct expressed in regular CHO cells. See Example 42.

[0334] FIG. 68 shows SDS-PAGE analysis, both reduced and nonreduced, of high and low affinity alleles of soluble CD) 16(ED) (SSS-S)H P283S CH2 WCH3 (SEQ ID NOs: ______,______. See Example 43.

[0335] FIG. 69 demonstrates the different binding capabilities of the high and low affinity CD16 fusion proteins (SEQ ID NOs: ______,______) to 2H7 V_{H} L11S scFv (CSC-S) WCH2 WCH3 (SEQ ID NO: ______) or 2H7 V_{H} L11S scFv (SSS-S) WCH2 WCH3 (SEQ ID NO: ______), and indicates a loss of high and low affinity allele binding using P238S CH2 constructs. See Example 43.

[0336] FIG. 70 shows a diagram of (A) an assay used to detect changes in Fc receptor binding using FITC conjugated CD16 extracellular domain Ig fusion protein with a mutated tail, which eliminates self-association and B) a mammalian display system using cell surface expression of SMIPs. See Example 44.

[0337] FIG. 71 shows the induction of apoptosis in Bjab and Ramos cells by various mAbs (SEQ ID NOs: ______,______,______,______,______,______,______) and scFvlg constructs of the invention (SEQ ID NOs: ______,______,______,______,______,______. See Example 45.

### DETAILED DESCRIPTION OF THE INVENTION

[0338] The present invention is directed to novel molecules useful, for example, as therapeutics, as well as for other purposes including diagnostic and research purposes. Such molecules have, for example, antigen-binding or other binding function(s) and, for example, one or more effector functions. The invention includes molecular constructs, including binding domain-immunoglobulin fusion proteins, and related compositions and methods, which will be useful in immunotherapeutic and immunodiagnostic applications, and in research methods, and which offer certain advantages over antigen-specific compounds and polypeptides of the prior art. The constructs, including fusion proteins, of the present invention are preferably single polypeptide chains that comprise, in pertinent part, the following fused or otherwise connected domains or regions: a binding region construct, such as a binding domain or polypeptide, a connecting region construct including, for example, a native or engineered immunoglobulin hinge region polypeptide, and a tail region construct, including, for example, a construct that may comprise, consist essentially of, or consist of, a native or engineered immunoglobulin heavy chain CH2 constant region polypeptide and a native or engineered immunoglobulin heavy chain CH3 constant region polypeptide. According to certain embodiments that are particularly useful for gene therapy, the constructs, including fusion proteins, of the present invention may further comprise a native or engineered plasma membrane anchor domain. According to certain other preferred embodiments the constructs, including fusion proteins, of the present invention may further include a tail region having a native or engineered immunoglobulin heavy chain CH4 constant region polypeptide. In particularly preferred embodiments, the binding regions, such as polypeptide domains, of which the constructs, including binding domain-immunoglobulin fusion proteins, are comprised are, or are derived from, polypeptides that are the products of human gene sequences, but the invention need not be so limited and may in fact relate to constructs, including binding domain-immunoglobulin fusion proteins, as provided herein that are derived from any natural or artificial source, including genetically engineered and/or mutated polypeptides.

[0339] The present invention relates in part to the surprising observation that the novel constructs, including binding domain-immunoglobulin fusion proteins, described herein are capable of immunological activity. More specifically, these proteins retain the ability to participate in well known immunological effector activities including, for example, antibody dependent cell mediated cytotoxicity (e.g., subsequent to antigen binding on a cell surface, engagement and induction of cytotoxic effector cells bearing appropriate Fc receptors, such as Natural Killer cells bearing FcRγIII, under appropriate conditions) and/or complement fixation in complement dependent cytotoxicity (e.g., subsequent to antigen binding on a cell surface, recruitment and activation of cytolytic proteins that are components of the blood complement cascade) despite having structures not be expected to be capable of promoting such effector activities or to promtion of such activities as described herein. For reviews of ADCC and CDC see, e.g., Carter, 2001 Nat. Rev. Canc. 1: 118; Sulica et al., 2001 Int. Rev. Immunol. 20: 371; Maloney et al., 2002 Semin. Oncol. 29: 2; Sondel et al., 2001 Hematol Oncol Clin North Am 15(4): 703-21; Maloney 2001 Anticanc. Drugs 12 Suppl.2: 1-4. IgA activation of complement by the alternative pathway is described, for example, in Schneiderman et al., 1990 J. Immunol. 145: 233. As described in greater detail below, ADCC, complement fixation, and CDC are unexpected functions for constructs, including fusion proteins, comprising for example immunoglobulin heavy chain regions and having the structures described herein, and in particular for immunoglobulin fusion proteins comprising, for example, immunoglobulin hinge region polypeptides that are compromised in their ability to form interchain, homodimeric disulfide bonds.

[0340] Another advantage afforded by the present invention is constructs, including binding domain-immunoglobulin fusion polypeptides, of the invention that can be produced in substantial quantities that are typically greater than those routinely attained with single-chain antibody constructs of the prior art, for example. In preferred embodiments, constructs, including the binding domain-immunoglobulin fusion polypeptides, of the present invention are recombinantly expressed in mammalian or other desired and useful expression systems, which offer the advantage of providing polypeptides that are stable in vivo (e.g., under physiological conditions). According to non-limiting theory, such stability may derive in part from posttranslational modifications, and specifically glycosylation. Production of the constructs, including binding domain-immunoglobulin fusion protein constructs, of the invention via recombinant mammalian expression has been attained in static cell cultures at a level of greater than 50 mg protein per liter culture supernatant and has been routinely observed in such cultures at 10-50 mg/liter, such that preferably at least 10-50 mg/liter may be produced under static culture conditions; also contemplated are enhanced production, in whole or in part, of the protein constructs of the invention using art-accepted scale-up methodologies such as “fed batch” (i.e., non-static) production, where yields of at least 5-500 mg/l, and in some instances at least 0.5-1 gm/l, depending on the particular protein product, are obtained.

[0341] A construct, including a binding domain polypeptide, according to the present invention may be, for example, any polypeptide that possesses the ability to specifically recognize and bind to a cognate biological molecule or complex of more than one molecule or assembly or aggregate, whether stable or transient, of such a molecule. Such molecules include proteins, polypeptides, peptides, amino acids, or derivatives thereof, lipids, fatty acids or the like, or derivatives thereof; carbohydrates, saccharides or the like or derivatives thereof; nucleic acids, nucleotides, nucleosides, purines, pyrimidines or related molecules, or derivatives thereof, or the like; or any combination thereof such as, for example, glycoproteins, glycopeptides, glycolipids, lipoproteins, proteolipids; or any other biological molecule that may be present in a biological sample. Biological samples may be provided, for example, by obtaining a blood sample, biopsy specimen, tissue explant, organ culture, biological fluid or any other tissue or cell or other preparation from a subject or a biological source. The subject or biological source may, for example, be a human or non-human animal, a primary cell culture or culture adapted cell line including but not limited to genetically engineered cell lines that may contain chromosomally integrated or episomal recombinant nucleic acid sequences, immortalized or immortalizable cell lines, somatic cell hybrid cell lines, differentiated or differentiatable cell lines, transformed cell lines and the like, etc. In certain preferred embodiments of the invention, the subject or biological source may be suspected of having or being at risk for having a disease, disorder or condition, including a malignant disease, disorder or condition or a B cell disorder, which in certain further embodiments may be an autoimmune disease, and in certain other embodiments of the invention the subject or biological source may be known to be free of a risk or presence of such disease, disorder or condition.

[0342] A binding region, including a binding domain polypeptide, for example, may be any naturally occurring, synthetic, semi-synthetic, and/or recombinantly produced binding partner for a biological or other molecule that is a target structure of interest, herein sometimes referred to as an “antigen” but intended according to the present disclosure to encompass any target biological or other molecule to which it is desirable to have the subject invention, for example, a fusion protein, bind or specifically bind. Constructs of the invention, including binding domain-immunoglobulin fusion proteins, are defined to be “immunospecific” or capable of binding to a desired degree, including specifically binding, if they bind a desired target molecule such as an antigen as provided herein, at a desired level, for example, with a Kₐ of greater than or equal to about 10⁴ M⁻¹, preferably of greater than or equal to about 10⁵ M⁻¹, more preferably of greater than or equal to about 10⁶ M⁻¹ and still more preferably of greater than or equal to about 10⁷ M⁻¹. Affinities of even greater than about 10⁷ M⁻¹ are still more preferred, such as affinities equal to or greater than about about 10⁷ M⁻¹, about 10⁸ M⁻¹, and about 10⁹ M⁻¹, and about 10¹⁰ M⁻¹. Affinities of binding domain-immunoglobulin fusion proteins according to the present invention can be readily determined using conventional techniques, for example those described by Scatchard et al., 1949 Ann. N.Y. Acad. Sci. 51: 660. Such determination of fusion protein binding to target antigens of interest can also be performed using any of a number of known methods for identifying and obtaining proteins that specifically interact with other proteins or polypeptides, for example, a yeast two-hybrid screening system such as that described in U.S. Pat. No. 5,283,173 and U.S. Pat. No. 5,468,614, or the equivalent.

[0343] Preferred embodiments of the subject invention constructs, for example, binding domain-immunoglobulin fusion proteins, comprise binding regions or binding domains that may include, for example, at least one native or engineered immunoglobulin variable region polypeptide, such as all or a portion or fragment of a native or engineered heavy chain and/or a native or engineered light chain V-region, provided it is capable of binding or specifically binding an antigen or other desired target structure of interest at a desired level of binding and selectivity. In other preferred embodiments the binding region or binding domain comprises, consists essentially of, or consists of, a single chain immunoglobulin-derived Fv product, for example, and scFv, which may include all or a portion of at least one native or engineered immunoglobulin light chain V-region and all or a portion of at least one native or engineered immunoglobulin heavy chain V-region, and a linker fused or otherwise connected to the V-regions; preparation and testing such constructs are described in greater detail herein. Other preparation and testing methods are well known in the art.

[0344] As described herein and known in the art, immunoglobulins comprise products of a gene family the members of which exhibit a high degree of sequence conservation. Amino acid sequences of two or more immunoglobulins or immunoglobulin domains or regions or portions thereof (e.g., V_{H} domains, V_{L} domains, hinge regions, CH2 constant regions, CH3 constant regions) may be aligned and analyzed. Portions of sequences that correspond to one another may be identified, for instance, by sequence homology. Determination of sequence homology may be determined with any of a number of sequence alignment and analysis tools, including computer algorithms well known to those of ordinary skill in the art, such as Align or the BLAST algorithm (Altschul, 1991 J. Mol. Biol. 219: 555-565; Henikoff and Henikoff, 1992 Proc. Natl. Acad. Sci. USA 89: 10915-10919), which is available at the NCBI website (http://www/ncbi.nlm.nih.gov/cgi-bin/BLAST). Default parameters may be used.

[0345] Portions, for example, of a particular immunoglobulin reference sequence and of any one or more additional immunoglobulin sequences of interest that may be compared to a reference sequence. “Corresponding” sequences, regions, fragments or the like, may be identified based on the convention for numbering immunoglobulin amino acid positions according to Kabat, Sequences of Proteins of Immunological Interest, (5^{th} ed. Bethesda, Md.: Public Health Service, National Institutes of Health (1991)). For example, according to this convention, the immunoglobulin family to which an immunoglobulin sequence of interest belongs is determined based on conservation of variable region polypeptide sequence invariant amino acid residues, to identify a particular numbering system for the immunoglobulin family, and the sequence(s) of interest can then be aligned to assign sequence position numbers to the individual amino acids which comprise such sequence(s). Preferably at least about 70%, more preferably at least about 80%-85% or about 86%-89%, and still more preferably at least about 90%, about 92%, about 94%, about 96%, about 98% or about 99% of the amino acids in a given amino acid sequence of at least about 1000, more preferably about 700-950, more preferably about 350-700, still more preferably about 100-350, still more preferably about 80-100, about 70-80, about 60-70, about 50-60, about 40-50 or about 30-40 consecutive amino acids of a sequence, are identical to the amino acids located at corresponding positions in a reference sequence such as those disclosed by Kabat (1991) or in a similar compendium of related immunoglobulin sequences, such as may be generated from public databases (e.g., Genbank, SwissProt, etc.) using sequence alignment tools such as, for example, those described above. In certain preferred embodiments, an immunoglobulin sequence of interest or a region, portion, derivative or fragment thereof is greater than about 95% identical to a corresponding reference sequence, and in certain preferred embodiments such a sequence of interest may differ from a corresponding reference at no more than about 1, 2, 3, 4, 5, 6, 7, 8, 9 or 10 amino acid positions.

[0346] For example, in certain embodiments the present invention is directed to a construct, including a binding domain-immunoglobulin fusion protein, comprising in pertinent part a human or other species immunoglobulin heavy chain variable region polypeptide comprising a mutation, alteration or deletion at an amino acid at a location or locations corresponding to one or more of amino acid positions 9, 10, 11, 12, 108, 110, 111, and 112 in, for example, SEQ ID NO:______, which comprises, for example, a murine V_{H}-derived sequence. At a relatively limited number of immunoglobulin V_{H} sequence positions, for example, including position 11, amino acid conservation is observed in the overwhelming majority of V_{H} sequences analyzed across mammalian species lines (e.g., Leu11, Val37, Gly44, Leu45, Trp47; Nguyen et al., 1998 J. Mol. Biol. 275: 413). Various such amino acid residues, and hence their side chains, are located at the surface of the variable domain (VH). They may contact residues of the C_{H}1 (e.g., Leu11) and the V_{L} domains (e.g., Val37, Gly44, Leu45, and Trp47) and may, in the absence of light chains, contribute to stability and solubility of the protein (see, e.g., Chothia et al., 1985 J. Mol. Biol. 186: 651; Muyldermans et al., 1994 Prot. Engineer. 7: 1129; Desmyter et al., 1996 Nat. Struct. Biol. 3: 803; Davies et al., 1994 FEBS Lett. 339: 285). In certain embodiments, for example, the present invention is also directed to a construct, including a binding domain-immunoglobulin fusion protein, comprising in pertinent part a human immunoglobulin light chain variable region polypeptide, or an immunoglobulin light chain variable region polypeptide from another species, comprising a mutation, alteration or deletion at an amino acid at a location or locations corresponding to one or more of amino acid positions 12, 80, 81, 82, 83, 105, 106, 107 and 108. In still other certain embodiments, for example, the present invention is directed to a construct, including a binding domain-immunoglobulin fusion protein, comprising in pertinent part (1) a human immunoglobulin heavy chain variable region polypeptide, or an immunoglobulin light chain variable region polypeptide from another species, comprising, consisting essentially of, or consisting of, said heavy chain sequence having a mutation, alteration or deletion at a location or locations corresponding to one or more of amino acid positions 9, 10, 11, 12, 108, 110, 111, and 112, and (2) a human immunoglobulin light chain variable region polypeptide, or an immunoglobulin light chain variable region polypeptide from another species, comprising, consisting essentially of, or consisting of, said light chain sequence having a mutation, alteration or deletion at a location or locations corresponding to one or more of amino acid positions 12, 80, 81, 82, 83, 105, 106, 107 and 108.

[0347] As another example, by reference to immunoglobulin sequence compendia and databases such as those cited above, for example, the relatedness of two or more immunoglobulin sequences to each other can readily and without undue experimentation be established in a manner that permits identification of the animal species of origin, the class and subclass (e.g., isotype) of a particular immunoglobulin or immunoglobulin region polypeptide sequence. Any immunoglobulin variable region polypeptide sequence, including native or engineered V_{H} and/or V_{L} and/or single-chain variable region (sFv) sequences or other native or engineered V region-derived sequences or the like, may be used as a binding region or binding domain. Engineered sequences includes immunoglobulin sequences from any species, preferably human or mouse, for example, that include, for example, a mutation, alteration or deletion at an amino acid at a location or locations corresponding to one or more of amino acid positions 9, 10, 11, 12, 108, 110, 111, and 112 in a heavy chain variable region sequence or an scFv, and/or a mutation, alteration or deletion at a location or locations corresponding to one or more of amino acid positions 12, 80, 81, 82, 83, 105, 106, 107 and 108 in a light chain variable region sequence or an scFv.

[0348] Various preferred embodiments include, for example, native or engineered immunoglobulin V region polypeptide sequences derived, for example, from antibodies including monoclonal antibodies such as murine or other rodent antibodies, or antibodies or monoclonal antibodies derived from other sources such as goat, rabbit, equine, bovine, camelid or other species, including transgenic animals, and also including human or humanized antibodies or monoclonal antibodies. Non-limiting examples include variable region polypeptide sequences derived from monoclonal antibodies such as those referenced herein and/or described in greater detail in the Examples below, for instance, CD20-binding or specific murine monoclonal antibodies (e.g., 2H7), monoclonal antibody L6 (specific for a carbohydrate-defined epitope and available from American Type Culture Collection, Manassas, Va., as hybridoma HB8677), and monoclonal antibodies that bind to or are specific for CD28 (e.g., monoclonal antibody 2E12), CD40, CD80, CD137 (e.g., monoclonal antibody 5B9 or monoclonal antibody 1D8 which recognizes the murine homologue of CD137, 41BB) and CD152 (CTLA-4).

[0349] Other binding regions, including binding domain polypeptides, may comprise any protein or portion thereof that retains the ability to bind or specifically bind to an antigen as provided herein, including non-immunoglobulins. Accordingly the invention contemplates constructs, including fusion proteins, comprising binding region or binding domain polypeptides that are derived from polypeptide ligands such as hormones, cytokines, chemokines, and the like; cell surface or soluble receptors for such polypeptide ligands; lectins; intercellular adhesion receptors such as specific leukocyte integrins, selectins, immunoglobulin gene superfamily members, intercellular adhesion molecules (ICAM-1, -2, -3) and the like; histocompatibility antigens; etc.

[0350] Examples of cell surface receptors useful in the preparation of, or as, binding regions, or that may provide a binding domain polypeptide, and that may also be selected as a target molecule or antigen to which a construct, including for example, a binding domain-Ig fusion protein of the present invention desirably binds, include the following, or the like: HER1 (e.g., GenBank Accession Nos. U48722, SEG_HEGFREXS, K03193), HER2 (Yoshino et al., 1994 J. Immunol. 152: 2393; Disis et al., 1994 Canc. Res. 54: 16; see also, e.g., GenBank Acc. Nos. X03363, M17730, SEG_HUMHER20), HER3 (e.g., GenBank Acc. Nos. U29339, M34309), HER4 (Plowman et al., 1993 Nature 366: 473; see also e.g., GenBank Acc. Nos. L07868, T64105), epidermal growth factor receptor (EGFR) (e.g., GenBank Acc. Nos. U48722, SEG_HEGFREXS, K03193), vascular endothelial cell growth factor (e.g., GenBank No. M32977), vascular endothelial cell growth factor receptor (e.g., GenBank Acc. Nos. AF022375, 1680143, U48801, X62568), insulin-like growth factor-I (e.g., GenBank Acc. Nos. X00173, X56774, X56773, X06043, see also European Patent No. GB 2241703), insulin-like growth factor-Il (e.g., GenBank Acc. Nos. X03562, X00910, SEG_HUMGFIA, SEG_HUMGFI2, M17863, M17862), transferrin receptor (Trowbridge and Omary, 1981 Proc. Nat. Acad. USA 78: 3039; see also e.g., GenBank Acc. Nos. X01060, M11507), estrogen receptor (e.g., GenBank Acc. Nos. M38651, X03635, X99101, U47678, M12674), progesterone receptor (e.g., GenBank Acc. Nos. X51730, X69068, M15716), follicle stimulating hormone receptor (FSH-R) (e.g., GenBank Acc. Nos. Z34260, M65085), retinoic acid receptor (e.g., GenBank Acc. Nos. L12060, M60909, X77664, X57280, X07282, X06538), MUC-1 (Barnes et al., 1989 Proc. Nat. Acad. Sci. USA 86: 7159; see also e.g., GenBank Acc. Nos. SEG_MUSMUCI0, M65132, M64928) NY-ESO-1 (e.g., GenBank Acc. Nos. AJ003149, U87459), NA 17-A (e.g., European Patent No. WO 96/40039), Melan-A/MART-1 (Kawakami et al., 1994 Proc. Nat. Acad. Sci. USA 91: 3515; see also e.g., GenBank Acc. Nos. U06654, U06452), tyrosinase (Topalian et al., 1994 Proc. Nat. Acad. Sci. USA 91: 9461; see also e.g., GenBank Acc. Nos. M26729, SEG_HUMTYRO, see also Weber et al., J. Clin. Invest (1998) 102: 1258), Gp-100 (Kawakami et al., 1994 Proc. Nat. Acad. Sci. USA 91: 3515; see also e.g., GenBank Acc. No. S73003, see also European Patent No. EP 668350; Adema et al., 1994 J. Biol. Chem. 269: 20126), MAGE (van den Bruggen et al., 1991 Science 254: 1643; see also e.g, GenBank Acc. Nos. U93163, AF064589, U66083, D32077, D32076, D32075, U10694, U10693, U10691, U10690, U10689, U10688, U10687, U10686, U10685, L18877, U10340, U10339, L18920, U03735, M77481), BAGE (e.g., GenBank Acc. No. U19180; see also U.S. Pat. Nos. 5,683,886 and 5,571,711), GAGE (e.g., GenBank Acc. Nos. AF055475, AF055474, AF055473, U19147, U19146, U19145, U19144, U19143, U19142), any of the CTA class of receptors including in particular HOM-MEL-40 antigen encoded by the SSX2 gene (e.g., GenBank Acc. Nos. X86175, U90842, U90841, X86174), carcinoembyonic antigen (CEA, Gold and Freedman, 1985 J. Exp. Med. 121: 439; see also e.g., GenBank Acc. Nos. SEG_HUMCEA, M59710, M59255, M29540), and PyLT (e.g., GenBank Acc. Nos. J02289, J02038).

[0351] Additional cell surface receptors that may be sources of binding region or binding domain polypeptides or portions thereof, or that may be targets, including target antigens, include the following, or the like: CD2 (e.g., GenBank Acc. Nos. Y00023, SEG_HUMCD2, M16336, M16445, SEG_MUSCD2, M14362), 4-1BB (CDw137, Kwon et al., 1989 Proc. Nat. Acad. Sci. USA 86: 1963, 4-1BB ligand (Goodwin et al., 1993 Eur. J. Immunol. 23: 2361; Melero et al., 1998 Eur. J. Immunol. 3: 116), CD5 (e.g., GenBank Acc. Nos. X78985, X89405), CD10 (e.g., GenBank Acc. Nos. M81591, X76732) CD27 (e.g., GenBank Acc. Nos. M63928, L24495, L08096), CD28 (June et al., 1990 Immunol. Today 11: 211; see also, e.g., GenBank Acc. Nos. J02988, SEG_HUMCD28, M34563), CD152/CTLA-4 (e.g., GenBank Acc. Nos. L15006, X05719, SEG_HUMIGCTL), CD40 (e.g., GenBank Acc. Nos. M83312, SEG_MUSCO₄₀A0, Y10507, X67878, X96710, U15637, L07414), interferon-γ (IFN-γ; see, e.g., Farrar et al. 1993 Ann. Rev. Immunol. 11: 571 and references cited therein, Gray et al. 1982 Nature 295: 503, Rinderknecht et al. 1984 J. Biol. Chem. 259: 6790, DeGrado et al. 1982 Nature 300: 379), interleukin-4 (IL-4; see, e.g., 53^{rd} Forum in Immunology, 1993 Research in Immunol. 144: 553-643; Banchereau et al., 1994 in The Cytokine Handbook, 2^{nd} ed., A. Thomson, ed., Academic Press, NY, p. 99; Keegan et al., 1994 J Leukocyt. Biol. 55: 272, and references cited therein), interleukin-17 (IL-17) (e.g., GenBank Acc. Nos. U32659, U43088) and interleukin-17 receptor (IL-17R) (e.g., GenBank Acc. Nos. U31993, U58917). Notwithstanding the foregoing, the present invention expressly does not encompass any immunoglobulin fusion protein that is disclosed in U.S. Pat. No. 5,807,734, or U.S. Pat. No. 5,795,572.

[0352] Additional cell surface receptors that may be sources of binding region or binding domain polypeptides or portions thereof, or that may serve as targets including target antigens or binding sites include the following, or the like: CD59 (e.g., GenBank Acc. Nos. SEG_HUMCD590, M95708, M34671), CD48 (e.g., GenBank Acc. Nos. M59904), CD58/LFA-3 (e.g., GenBank Acc. No. A25933, Y00636, E12817; see also JP 1997075090-A), CD72 (e.g., GenBank Acc. Nos. AA311036, S40777, L35772), CD70 (e.g., GenBank Acc. Nos. Y13636, S69339), CD80/B7.1 (Freeman et al., 1989 J. Immunol. 43: 2714; Freeman et al., 1991 J. Exp. Med. 174: 625; see also e.g., GenBank Acc. Nos. U33208, 1683379), CD86/B7.2 (Freeman et al., 1993 J. Exp. Med. 178: 2185, Boriello et al., 1995 J. Immunol. 155: 5490; see also, e.g., GenBank Acc. Nos. AF099105, SEG_MMB72G, U39466, U04343, SEG_HSB725, L25606, L25259), B7-H1/B7-DC (e.g., Genbank Acc. Nos. NM_{—}014143, AF177937, AF317088; Dong et al., 2002 Nat. Med. June 24 [epub ahead of print], PMID 12091876; Tseng et al., 2001 J. Exp. Med. 193: 839; Tamura et al., 2001 Blood 97: 1809; Dong et al., 1999 Nat. Med. 5: 1365), CD40 ligand (e.g., GenBank Acc. Nos. SEG_HUMCD40L, X67878, X65453, L07414), IL-17 (e.g., GenBank Acc. Nos. U32659, U43088), CD43 (e.g., GenBank Acc. Nos. X52075, J04536), ICOS (e.g., Genbank Acc. No. AH011568), CD3 (e.g., Genbank Acc. Nos. NM_{—}000073 (gamma subunit), NM_{—}000733 (epsilon subunit), X73617 (delta subunit)), CD4 (e.g., Genbank Acc. No. NM-000616), CD25 (e.g., Genbank Acc. No. NM_{—}000417), CD8 (e.g., Genbank Acc. No. M12828), CD11b (e.g., Genbank Acc. No. J03925), CD14 (e.g., Genbank Acc. No. XM 039364), CD56 (e.g., Genbank Acc. No. U63041), CD69 (e.g., Genbank Acc. No.NM_{—}001781) and VLA-4 (α₄β₇) (e.g., GenBank Acc. Nos. L12002, X16983, L20788, U97031, L24913, M68892, M95632). The following cell surface receptors are typically associated with B cells: CD19 (e.g., GenBank Acc. Nos. SEG_HUMCD19W0, M84371, SEG_MUSCD19W, M62542), CD20 (e.g., GenBank Acc. Nos. SEG_HUMCD20, M62541), CD22 (e.g., GenBank Acc. Nos. 1680629, Y10210, X59350, U62631, X52782, L16928), CD30 (e.g., Genbank Acc. Nos. M83554, D86042), CD153 (CD30 ligand, e.g., GenBank Acc. Nos. L09753, M83554), CD37 (e.g., GenBank Acc. Nos. SEG_MMCD37X, X14046, X53517), CD50 (ICAM-3, e.g., GenBank Acc. No. NM_{—}002162), CD106 (VCAM-1) (e.g., GenBank Acc. Nos. X53051, X67783, SEG_MMVCAM1C, see also U.S. Pat. No. 5,596,090), CD54 (ICAM-1) (e.g., GenBank Acc. Nos. X84737, S82847, X06990, J03132, SEG_MUSICAM0), interleukin-12 (see, e.g., Reiter et al, 1993 Crit. Rev. Immunol. 13: 1, and references cited therein), CD134 (OX40, e.g., GenBank Acc. No. AJ277151), CD137 (41BB, e.g., GenBank Acc. No. L12964, NM_{—}001561), CD83 (e.g., GenBank Acc. Nos. AF001036, AL021918), DEC-205 (e.g., GenBank Acc. Nos. AF011333, U19271).

[0353] Constructs, including binding domain-immunoglobulin fusion proteins, of the present invention comprise, for example, a binding domain, such as a binding domain polypeptide that, according to certain particularly preferred embodiments, is capable of binding or specifically binding at least one target, for example, a target antigen or other binding site that is present on an immune effector cell. According to non-limiting theory, such constructs, including for example binding domain-immunoglobulin fusion proteins, may advantageously recruit desired immune effector cell function(s) in a therapeutic context, where it is well known that immune effector cells having different specialized immune functions can be identified or distinguished from one another on the basis of their differential expression of a wide variety of cell surface antigens, including many of the antigens described herein to which constructs of the invention including binding domain polypeptides can specifically bind. As noted herein, immune effector cells include any cell that is capable of directly mediating an activity which is a component of immune system function, including cells having such capability naturally or as a result of genetic engineering.

[0354] In certain embodiments an immune effector cell comprises a cell surface receptor for an immunoglobulin or other peptide binding molecule, such as a receptor for an immunoglobulin constant region and including the class of receptors commonly referred to as “Fc receptors” (“FcR”s). A number of FcRs have been structurally and/or functionally characterized and are well known in the art, including FcR having specific abilities to interact with a restricted subset of immunoglobulin heavy chain isotypes, or that interact with Fc domains with varying affinities, and/or which may be expressed on restricted subsets of immune effector cells under certain conditions (e.g., Kijimoto-Ochichai et al., 2002 Cell Mol. Life Sci. 59: 648; Davis et al., 2002 Curr. Top. Microbiol. Immunol. 266: 85; Pawankar, 2001 Curr. Opin. Allerg. Clin. Immunol. 1: 3; Radaev et al., 2002 Mol. Immunol. 38: 1073; Wurzburg et al., 2002 Mol. Immunol. 38: 1063; Sulica et al., 2001 Int. Rev. Immunol. 20: 371; Underhill et al., 2002 Ann. Rev. Immunol. 20: 825; Coggeshall, 2002 Curr. Dir. Autoimm. 5: 1; Mimura et al., 2001 Adv. Exp. Med. Biol. 495: 49; Baumann et al., 2001 Adv. Exp. Med. Biol. 495: 219; Santoso et al., 2001 Ital. Heart J. 2: 811; Novak et al., 2001 Curr. Opin. Immunol. 13: 721; Fossati et al., 2001 Eur. J. Clin. Invest. 31: 821).

[0355] Cells that are capable of mediating ADCC are preferred examples of immune effector cells according to the present invention. Other preferred examples include Natural Killer cells, tumor-infiltrating T lymphocytes (TILs), cytotoxic T lymphocytes, and granulocytic cells such as cells that comprise allergic response mechanisms. Immune effector cells thus include, but are not limited to, cells of hematopoietic origins including cells at various stages of differentiation within myeloid and lymphoid lineages and which may (but need not) express one or more types of functional cell surface FcR, such as T lymphocytes, B lymphocytes, NK cells, monocytes, macrophages, dendritic cells, neutrophils, basophils, eosinophils, mast cells, platelets, erythrocytes, and precursors, progenitors (e.g., hematopoietic stem cells), as well as quiescent, activated, and mature forms of such cells. Other immune effector cells may include cells of non-hematopoietic origin that are capable of mediating immune functions, for example, endothelial cells, keratinocytes, fibroblasts, osteoclasts, epithelial cells, and other cells. Immune effector cells may also include cells that mediate cytotoxic or cytostatic events, or endocytic, phagocytic, or pinocytotic events, or that effect induction of apoptosis, or that effect microbial immunity or neutralization of microbial infection, or cells that mediate allergic, inflammatory, hypersensitivity and/or autoimmune reactions.

[0356] Allergic response mechanisms are well known in the art and include an antigen (e.g., allergen)-specific component such as an immunoglobulin (e.g., IgE), as well as the cells and mediators which comprise sequelae to allergen-immunoglobulin (e.g., IgE) encounters (e.g., Ott et al., 2000 J. Allerg. Clin. Immunol. 106: 429; Barnes, 2000 J. Allerg. Clin. Immunol. 106: 5; Togias, 2000 J. Allerg. Clin. Immunol. 105: S599; Akdis et al., 2000 Int. Arch. Allerg. Immunol. 121: 261; Beach, 2000 Occup. Med. 15: 455). Particularly with regard to constructs, including binding domain-immunoglobulin fusion proteins, of the present invention that interact with FcR, certain embodiments of the present invention contemplate constructs including fusion proteins that comprise one or more IgE-derived domains including, for example, those that are capable of inducing an allergic response mechanism that comprises IgE-specific FcR, or portions thereof, which IgE-specific FcRs include those noted above and described or identified in the cited articles. Without wishing to be bound by particular theory or mechanism, and as disclosed herein, constructs, including fusion proteins, of the present invention may comprise portions of IgE heavy chain Fc domain polypeptides, for example, native or engineered IgE CH3 and CH4 domains, whether provided or expressed as cell surface proteins (e.g., with a plasma membrane anchor domain) or as soluble or otherwise not cell-bound proteins (e.g., without a plasma membrane anchor domain). Further according to non-limiting theory, recruitment and induction of an allergic response mechanism (e.g., an FcR-epsilon expressing immune effector cell) may proceed as the result of either or both of the presence of an IgE Fc domain or portion thereof as described herein (e.g., one that is capable of triggering an allergic mechanism by FcR crosslinking) and the presence of a target such as a antigen to which the binding region, for example a binding domain, binds or specifically binds. The present invention therefore exploits induction of allergic response mechanisms in heretofore unappreciated contexts, such as treatment of a malignant condition or a B cell disorder, including those described or referenced herein.

[0357] An immunoglobulin hinge region polypeptide includes any hinge peptide or polypeptide that occurs naturally, as an artificial peptide or as the result of genetic engineering and that is situated, for example, in an immunoglobulin heavy chain polypeptide between the amino acid residues responsible for forming intrachain immunoglobulin-domain disulfide bonds in CH1 and CH2 regions. Hinge region polypeptides for use in the present invention may also include a mutated or otherwise alterd hinge region polypeptide. Accordingly, for example, an immunoglobulin hinge region polypeptide may be derived from, or may be a portion or fragment of (i.e., one or more amino acids in peptide linkage, typically about 15-115 amino acids, preferably about 95-110, about 80-94, about 60-80, or about 5-65 amino acids, preferably about 10-50, more preferably about 15-35, still more preferably about 18-32, still more preferably about 20-30, still more preferably about 21, 22, 23, 24, 25, 26, 27, 28 or 29 amino acids) an immunoglobulin polypeptide chain region classically regarded as having hinge function, including those described herein, but a hinge region polypeptide for use in the instant invention need not be so restricted and may include one or more amino acids situated (according to structural criteria for assigning a particular residue to a particular domain that may vary, as known in the art) in an adjoining immunoglobulin domain such as a CH1 domain and/or a CH2 domain in the cases of IgG, IgA and IgD (or in an adjoining immunoglobulin domain such as a CH1 domain and/or a CH3 domain in the case of IgE), or in the case of certain artificially engineered immunoglobulin constructs, an immunoglobulin variable region domain.

[0358] Wild-type immunoglobulin hinge region polypeptides include any known or later-discovered naturally occurring hinge region that is located between the constant region domains, CH1 and CH2, of an immunoglobulin, for example, a human immunoglobulin (or between the CH1 and CH3 regions of certain types of immunoglobulins, such as IgE). For use in constructing one type of connecting region, the wild-type immunoglobulin hinge region polypeptide is preferably a human immunoglobulin hinge region polypeptide, preferably comprising a hinge region from a human IgG, IgA, or IgD immunoglobulin (or the CH2 region of an IgE immunoglobulin), and more preferably, for example, a hinge region polypeptide from a wild-type or mutated human IgG1 isotype as described herein.

[0359] As is known to the art, despite the tremendous overall diversity in immunoglobulin amino acid sequences, immunoglobulin primary structure exhibits a high degree of sequence conservation in particular portions of immunoglobulin polypeptide chains, notably with regard to the occurrence of cysteine residues which, by virtue of their sulfhydryl groups, offer the potential for disulfide bond formation with other available sulfydryl groups. Accordingly, in the context of the present invention wild-type immunoglobulin hinge region polypeptides for use as connecting regions include those that feature one or more highly conserved (e.g., prevalent in a population in a statistically significant manner) cysteine residues, and in certain preferred embodiments a connecting region may comprise, or consist essentially of, or consist of, a mutated hinge region polypeptide may be selected that contains less than the number of naturally-occuring cysteines, for example, zero or one or two cysteine residue(s) in the case of IgG1 and IgG4 hinge regions, and that is derived or constructed from (or using) such a wild-type hinge region sequence.

[0360] In certain preferred embodiments wherein the connecting region is a hinge region polypeptide and the hinge region polypeptide is a mutated, engineered or otherwise altered human IgG1 immunoglobulin hinge region polypeptide that is derived or constructed from (or using) a wild-type hinge region sequence, it is noted that the wild-type human IgG1 hinge region polypeptide sequence comprises three non-adjacent cysteine residues, referred to as a first cysteine of the wild-type hinge region, a second cysteine of the wild-type hinge region and a third cysteine of the wild-type hinge region, respectively, proceeding along the hinge region sequence from the polypeptide N-terminus toward the C-terminus. This can be referred to herein as a “CCC” hinge (or a “WTH”, i.e., a wild-type hinge). Examples of mutated or engineered hinge regions include those with no cysteines, which may be referred to herein as an “XXX” hinge (or, for example, as “MH-XXX,” referring to a mutant or engineered hinge with three amino acids or other molecules in place of naturally occuring cysteines, such as, for example, “MH-SSS”, which refers to a mutant hinge with three serine residues in place of the naturally occuring cysteine residues. It will be understood that the term “mutant” refers only to the fact that a different molecule or molecules is present, or no molecule, at the position of a naturally occuring residue and does not refer to any particular method by which such substitution, alteration, or deletion has been carried out. Accordingly, in certain embodiments of the present invention, the connecting region may be a hinge region polypeptide and the hinge region polypeptide is a mutated human IgG1 immunoglobulin hinge region polypeptide that contains two cysteine residues and in which the first cysteine of the wild-type hinge region has not changed or deleted, for example. This can be referred to as a “MH-CXX” hinge, for example, a “MH-CSC” hinge, in which case the cysteine residue has been replaced with a serine residue. In certain other embodiments of the present invention the mutated human IgG1 immunoglobulin hinge region polypeptide contains no more than one cysteine residue and include, for example, a “MH-CSS” hinge or a “MH-SSC” hinge or a “MH-CSC” hinge, and in certain other embodiments the mutated human IgG1 immunoglobulin hinge region polypeptide contains no cysteine residues such as, for example, a “MH-SSS” hinge.

[0361] The constructs, including binding domain-immunoglobulin fusion proteins, of the present invention expressly do not contemplate any fusion protein that is disclosed in U.S. Pat. No. 5,892,019. U.S. Pat. No. 5,892,019 refers to a human IgG1 hinge region in which the first IgG1 hinge region cysteine residue has been changed or deleted, but retains both of the second and third IgG1 hinge region cysteine residues that correspond to the second and third cysteines of the wild-type IgG1 hinge region sequence. The patent states that the first cysteine residue of the wild-type IgG1 hinge region is replaced to prevent interference by the first cysteine residue with proper assembly of the polypeptide described therein into a dimer. The patent requires that the second and third cysteines of the IgG1 hinge region be retained to provide interchain disulfide lirikage between two heavy chain constant regions to promote dimer formation so that the molecule contains has effector function such as the ability to mediate ADCC.

[0362] By contrast and as described herein, the constructs, including the binding domain-immunogloblin fusion proteins, of the present invention, various of which are capable of ADCC, CDC and/or complement fixation, for example, are not so limited and may comprise, in pertinent part, for example, (i) a wild-type immunoglobulin hinge region polypeptide, such as a wild-type human immunoglobulin hinge region polypeptide, for example, a human IgG1 immunoglobulin hinge region polypeptide, (ii) a mutated or otherwise altered immunoglobulin hinge region polypeptide, such as a mutated or otherwise altered human immunoglobulin hinge region polypeptide, for example, a mutated or otherwise altered human IgG1 immunoglobulin hinge region polypeptide that, for example, is or has been derived or constructed from (or using) a wild-type immunoglobulin hinge region polypeptide or nucleic acid sequence having three or more cysteine residues, wherein the mutated or otherwise altered human IgG1 immunoglobulin hinge region polypeptide contains two cysteine residues and wherein a first cysteine of the wild-type hinge region is not mutated or deleted, (iii) a mutated or otherwise altered immunoglobulin hinge region polypeptide, such as a mutated or otherwise altered human immunoglobulin hinge region polypeptide, for example, a mutated or otherwise altered human IgG1 immunoglobulin hinge region polypeptide that, for example, is or has been derived or constructed from (or using) a wild-type immunoglobulin hinge region polypeptide or nucleic acid sequence having three or more cysteine residues, wherein the mutated or otherwise altered human IgG1 immunoglobulin hinge region polypeptide contains no more than one cysteine residue, or (iv) a mutated or otherwise altered immunoglobulin hinge region polypeptide, such as a mutated or otherwise altered human immunoglobulin hinge region polypeptide, for example, a mutated or otherwise altered human IgG1 immunoglobulin hinge region polypeptide that is or has been derived or constructed from (or using) a wild-type immunoglobulin hinge region polypeptide or nucleic acid sequence having three or more cysteine residues, wherein the mutated or otherwise altered (for example, by amino acid change or deletion) human IgG1 immunoglobulin hinge region polypeptide contains no cysteine residues. The present invention offers unexpected advantages associated with retention by the constructs, including the fusion proteins, described herein of the ability to mediate ADCC and/or CDC and/or complement fixation notwithstanding that the ability to dimerize via IgG1 hinge region interchain disulfide bonds is ablated or compromised by the removal or replacement of one, two or three hinge region cysteine residues, and even in constructs where the first cysteine of an IgG1 hinge region, for example, is not mutated or otherwise altered or deleted.

[0363] A connnecting region may comprise a mutated or otherwise altered immunoglobulin hinge region polypeptide, which itself may comprise a hinge region that has its origin in an immunoglobulin of a species, of an immunoglobulin isotype or class, or of an immunoglobulin subclass that is different from that of the tail region, for example, a tail region comprising, or consisting essentially or, or consisting of, CH2 and CH3 domains (or IgE CH3 and CH4 domains). For instance, in certain embodiments of the invention, a construct, for example, a binding domain-immunoglobulin fusion protein, may comprise a binding region such as a binding domain polypeptide that is fused or otherwise connected to an immunoglobulin hinge region polypeptide comprising, or consisting essentially of, or consisting of, a wild-type human IgA hinge region polypeptide, or a mutated or otherwise altered human IgA hinge region polypeptide that contains zero or only one or more cysteine residues (but less than the wild-type number of cysteines), as described herein, or a wild-type human IgG hinge, such as an IgG1 hinge, region polypeptide, or a wild-type human IgE hinge-acting region, i.e., IgE CH2 region polypeptide, or a mutated or otherwise altered human IgG hinge, such as an IgG1 hinge, region polypeptide that is or has been mutated or otherwise altered to contain zero, one or two cysteine residues wherein the first cysteine of the wild-type hinge region is not mutated or altered or deleted, as also described herein. Such a hinge region polypeptide may be fused or otherwise connected to, for example, a tail region comprising, or consisting essentially of, or consisting of, an immunoglobulin heavy chain CH2 region polypeptide from a different Ig isotype or class, for example an IgA or an IgD or an IgG subclass (or a CH3 region from an IgE subclass), which in certain preferred embodiments will be the IgG1 or IgA or IgE subclass and in certain other preferred embodiments may be any one of the IgG2, IgG3 or IgG4 subclasses.

[0364] For example, and as described in greater detail herein, in certain embodiments of the present invention a connecting region may be selected to be an immunoglobulin hinge region polypeptide, which is or has been derived from a wild-type human IgA hinge region that naturally comprises three cysteines, where the selected hinge region polypeptide is truncated or otherwise altered or substituted relative to the complete and/or naturally-occuring hinge region such that only one or two of the cysteine residues remain (e.g., SEQ ID NOS:35-36). Similarly, in certain other embodiments of the invention, the construct may be binding domain-immunoglobulin fusion protein comprising a binding domain polypeptide that is fused or otherwise connected to an immunoglobulin hinge region polypeptide comprising a mutated or otherwise altered hinge region polypeptide in which the number of cysteine residues is reduced by amino acid substitution or deletion, for example a mutated or otherwise altered IgG1 hinge region containing zero, one or two cysteine residues as described herein, or an IgD hinge region containing zero cysteine residues.

[0365] A mutated or otherwise altered hinge region polypeptide may thus be derived or constructed from (or using) a wild-type immunoglobulin hinge region that contains one or more cysteine residues. In certain embodiments, a mutated or otherwise altered hinge region polypeptide may contain zero or only one cysteine residue, wherein the mutated or otherwise altered hinge region polypeptide is or has been derived from a wild type immunoglobulin hinge region that contains, respectively, one or more or two or more cysteine residues. In the mutated or otherwise altered hinge region polypeptide, the cysteine residues of the wild-type immunoglobulin hinge region are preferably deleted or substituted with amino acids that are incapable of forming a disulfide bond. In one embodiment of the invention, a mutated or otherwise altered hinge region polypeptide is or has been derived from a human IgG wild-type hinge region polypeptide, which may include any of the four human IgG isotype subclasses, IgG1, IgG2, IgG3 or IgG4. In certain preferred embodiments, the mutated or otherwise altered hinge region polypeptide is or has been derived from (or using) a human IgA or IgD wild-type hinge region polypeptide. By way of example, a mutated or otherwise altered hinge region polypeptide that is or has been derived from a human IgG1 or IgA wild-type hinge region polypeptide may comprise mutations, alterations, or deletions at two of the three cysteine residues in the wild-type immunoglobulin hinge region, or mutations, alterations, or deletions at all three cysteine residues.

[0366] The cysteine residues that are present in a wild-type immunoglobulin hinge region and that are removed or altered by mutagenesis or any other techniques according to particularly preferred embodiments of the present invention include cysteine residues that form, or that are capable of forming, interchain disulfide bonds. Without wishing to be bound by particular theory or mechanism of action, the present invention contemplates that mutation, deletion, or other alteration of such hinge region cysteine residues, which are believed to be involved in formation of interchain disulfide bridges, reduces the ability of the subject invention binding domain-immunoglobulin fusion protein to dimerize (or form higher oligomers) via interchain disulfide bond formation, while surprisingly not ablating or undesireably compromising the ability of a fusion protein or other construct to promote ADCC, and/or CDC and/or to fix complement. In particular, the Fc receptors that mediate ADCC (e.g., FcRIII, CD16) exhibit low affinity for immunoglobulin Fc domains, supporting the idea that functional binding of Fc to FcR requires avidity stabilization of the Fc-FcR complex by virtue of the dimeric structure of heavy chains in a conventional antibody, and/or FcR aggregation and cross-linking by a conventional antibody Fc structure. Sonderman et al., 2000 Nature 406: 267; Radaev et al., 2001 J. Biol. Chem. 276: 16469; Radaev et al., 2001 J. Biol. Chem. 276: 16478; Koolwijk et al., 1989 J. Immunol. 143: 1656; Kato et al., 2000 Immunol. Today 21: 310. Hence, the constructs, including for example binding domain-immunoglobulin fusion proteins, of the present invention provide the advantages associated with single-chain constructs including singe-chain immunoglobulin fusion proteins while also unexpectedly retaining one or more immunological activities. Similarly, the ability to fix complement is typically associated with immunoglobulins that are dimeric with respect to heavy chain constant regions such as those that comprise Fc, while various constructs, including binding domain-immunoglobulin fusion proteins, of the present invention, which may, due to the replacement or deletion of hinge region cysteine residues or due to other structural modifications as described herein, for example, have compromised or ablated abilities to form interchain disulfide bonds, exhibit the unexpected ability to fix complement. Additionally, according to certain embodiments of the present invention wherein a construct, including, for example, a binding domain-immunoglobulin fusion protein, may comprise a connecting region and tail region comprising, or consisting essentially of, or consisting of, one or more of a human IgE hinge-acting region, i.e., a IgE CH2 region polypeptide, a human IgE CH3 constant region polypeptide, and a human IgE CH4 constant region polypeptide, the invention constructs including fusion proteins unexpectedly retain the immunological activity of mediating ADCC and/or of inducing an allergic response mechanism.

[0367] Selection of an immunoglobulin hinge region polypeptide as a connecting region according to certain embodiments of the subject invention constructs, such as binding domain-immunoglobulin fusion proteins, may relate to the use of an “alternative hinge region” polypeptide sequence, which includes a polypeptide sequence that is not necessarily derived from any immunoglobulin hinge region sequence per se. Instead, an alternative hinge region refers to a hinge region polypeptide that comprises an amino acid sequence, or other molecular sequence, of at least about ten consecutive amino acids or molecules, and in certain embodiments at least about 11, 12, 13, 14, 15, 16, 17, 18, 19, 20, 21-25, 26-30, 31-50, 51-60, 71-80, 81-90, or 91-110 amino acids or molecules that is present in a sequence selected from any one of SEQ ID NOS:______-______, for example a polypeptide sequence that is or has been derived from a region located between intrachain disulfide-generated immunoglobulin-like loop domains of immunoglobulin gene superfamily members such as CD2 (e.g., Genbank Acc. No. NM_{—}001767), CD4 (e.g., Genbank Acc. No. NM_{—}000616), CD5 (e.g., Genbank Acc. No. BC027901), CD6 (e.g., Genbank Acc. No. NM-006725), CD7 (e.g., Genbank Acc. Nos. XM_{—}046782, BC009293, NM_{—}006137) or CD8 (e.g., Genbank Acc. No. M12828), or other Ig superfamily members. By way of non-limiting example, an alternative hinge region used as a connecting region, for example, may provide a glycosylation site as provided herein, or may provide a human gene-derived polypeptide sequence for purposes of enhancing the degree of “humanization” of a fusion protein, or may comprise, or consist essentially of, or consist of, an amino acid sequence that eliminates or reduces the ability of a construct of the invention, such as a fusion protein, to form multimers or oligomers or aggregates or the like. Certain alternative hinge region polypeptide sequences, including those described herein, may be derived or constructed from (or using) the polypeptide sequences of immunoglobulin gene superfamily members that are not actual immunoglobulins per se. For instance and according to non-limiting theory, certain polypeptide sequences that are situated between intrachain disulfide-generated immunoglobulin loop domain of immunoglobulin gene super-family member proteins may be used in whole or in part as alternative hinge region polypeptides as provided herein, or may be further modified for such use.

[0368] As noted above, the constructs of the invention, including binding domain-immunoglobulin fusion proteins, are believed, according to non-limiting theory, to be compromised in their ability to dimerize via interchain disulfide bond formation, and further according to theory, this property is a consequence, in whole or in part, of a reduction in the number of cysteine residues that are present in an immunoglobulin hinge region polypeptide selected for inclusion in the construction of the construct, such as a fusion protein construct. Determination of the relative ability of a polypeptide to dimerize is well within the knowledge of the relevant art, where any of a number of established methodologies may be applied to detect protein dimerization (see, e.g., Scopes, Protein Purification: Principles and Practice, 1987 Springer-Verlag, New York). For example, biochemical separation techniques for resolving proteins on the basis of molecular size (e.g., gel electrophoresis, gel filtration chromatography, analytical ultracentrifugation, etc.), and/or comparison of protein physicochemical properties before and after introduction of sulfhydryl-active (e.g., iodoacetamide, N-ethylmaleimide) or disulfide-reducing (e.g., 2-mercaptoethanol, dithiothreitol) agents, or other equivalent methodologies, may all be employed for determining a degree of polypeptide dimerization or oligomerization, and for determining possible contribution of disulfide bonds to such potential quarternary structure. In certain embodiments, the invention relates to a construct, for example a binding domain-immunoglobulin fusion protein, that exhibits a reduced (i.e., in a statistically significant manner relative to an appropriate IgG-derived control, for example) ability to dimerize, relative to a wild-type human immunoglobulin G hinge region polypeptide as provided herein. Those familiar with the art will be able readily to determine whether a particular fusion protein displays such reduced ability to dimerize.

[0369] Compositions and methods for preparation of immunoglobulin fusion proteins, for example, are well known in the art. See, e.g., U.S. Pat. No. 5,892,019, which reports recombinant proteins that are the products of a single encoding polynucleotide but which are not constructs, including binding domain-immunoglobulin fusion proteins, according to the present invention.

[0370] For a construct, for example, an immunoglobulin fusion protein of the invention which is intended for use in humans, any included Ig constant regions will typically be of human sequence origin, or humanized, to minimize a potential anti-human immune response and to provide appropriate and/or desired effector functions. Manipulation of sequences encoding antibody constant regions is referenced in the PCT publication of Morrison and Oi, WO 89/07142. In particularly preferred embodiments, a tail region is prepared from an immunoglobulin heavy chain constant region in which the CH1 domain is or has been deleted (the CH1 and CH2 regions in the case of IgE) and the carboxyl end of the binding domain, or where the binding domain comprises two immunoglobulin variable region polypeptides, the second (i.e., more proximal to the C-terminus) variable region is joined to the amino terminus of CH2 through one or more connnecting regions, such as a hinge or altered region. A schematic diagram depicting the structures of two exemplary binding domain-immunoglobulin fusion proteins is shown in FIG. 11. In particularly preferred embodiments no interchain disulfide bonds are present, and in other embodiments a restricted number of interchain disulfide bonds may be present relative to the number of such bonds that would be present if wild-type hinge region polypeptides were instead present. In-other embodiments a construct of the invention, such as for example, a fusion protein, comprises, or consists essentially of, or consists of, a mutated or otherwise altered hinge region polypeptide that exhibits a reduced ability to dimerize, relative to a wild-type human IgG hinge region polypeptide. Thus, an isolated polynucleotide molecule coding for such a single chain construct, such as an immunoglobulin fusion protein, has a binding region, for example, a domain that provides specific or otherwise desired binding affinity and selectivity for a target, such as a target antigen.

[0371] The invention also contemplates, for example, in certain embodiments, constructs including binding domain-immunoglobulin fusion proteins that comprise fused or otherwise connected polypeptide sequences or portions thereof derived or prepared from a plurality of genetic sources, for example, according to molecular “domain swapping” paradigms. Those having familiarity with the art will appreciate that selection of such polypeptide sequences for assembly into a construct, such as a binding domain-immunoglobulin fusion protein, for example, may involve determination of appropriate portions of each component polypeptide sequence, for example, based on structural and/or functional properties of each such sequence (see, e.g., Carayannopoulos et al., 1996 J. Exp. Med 183: 1579; Harlow et al., Eds., Antibodies. A Laboratory Manual, Cold Spring Harbor Laboratory, Cold Spring Harbor (1988)). The component polypeptide sequences of which the construct, such as a fusion protein, is comprised or prepared may therefore comprise intact or full-length binding domain, immunoglobulin, linker and/or plasma membrane anchor domain polypeptide sequences, or truncated versions or variants thereof such as those provided herein. According to these and related embodiments of the invention, any two or more of the candidate component polypeptides of which the subject invention constructs, for example, fusion proteins, may be comprised will be derived or prepared from independent sources, such as from immunoglobulin sequences of differing allotype, isotype, subclass, class, or species of origin (e.g., xenotype). Thus, as a non-limiting example, a binding domain polypeptide (or its constituent polypeptides such as one or more variable region polypeptides and/or a linker polypeptide), a hinge region polypeptide, immunoglobulin heavy chain CH2 and CH3 constant region polypeptides and optionally an immunoglobulin heavy chain CH4 constant region polypeptide as may be obtained from an IgM or IgE heavy chain, and a plasma membrane anchor domain polypeptide may all be separately obtained from distinct genetic sources and engineered into a chimeric or fusion protein using well known techniques and according to methodologies described herein, for example.

[0372] Accordingly, a construct of the invention, for example a binding domain-immunoglobulin fusion protein according to certain embodiments of the present invention, may also therefore comprise in pertinent part an immunoglobulin heavy chain CH3 constant region polypeptide that is a wild-type IgA CH3 constant region polypeptide, or alternatively, that is a mutated or otherwise altered or substituted or truncated IgA CH3 constant region polypeptide that is incapable of associating with a J chain, or that will not associate to an undesired degree with a J chain; preferably the IgA CH3 constant region polypeptides used in a tail region portion of a construct are of human origin or are humanized. By way of brief background, IgA molecules are known to be released into secretory fluids by a mechanism that involves association of IgA into disulfide-linked polymers (e.g., dimers) via a J chain polypeptide (e.g., Genbank Acc. Nos. XM-059628, M12378, M12759; Johansen et al., 1999 Eur. J. Immunol. 29: 1701) and interaction of the complex so formed with another protein that acts as a receptor for polymeric immunoglobulin, and which is known as transmembrane secretory component (SC; Johansen et al., 2000 Sc. J. Immunol. 52: 240; see also, e.g., Sorensen et al., 2000 Int. Immunol. 12: 19; Yoo et al., 1999 J. Biol. Chem. 274: 33771; Yoo et al., 2002 J. Immunol. Meth. 261: 1; Corthesy, 2002 Trends Biotechnol. 20: 65; Symersky et al., 2000 Mol. Immunol. 37: 133; Crottet et al., 1999 Biochem. J. 341: 299). Interchain disulfide bond formation between IgA Fc domains and J chain is mediated through a penultimate cysteine residue in an 18-amino acid C-terminal extension that forms part of the IgA heavy chain constant region CH3 domain polypeptide (Yoo et al., 1999; Sorensen et al., 2000). Certain embodiments of the subject invention constructs, including for example, fusion proteins, therefore contemplate inclusion of the wild-type IgA heavy chain constant region polypeptide sequence, which is capable of associating with J chain. Certain other embodiments of the invention, however, contemplate fusion proteins that comprise a mutated or otherwise altered, substituted, or truncated IgA CH3 constant region polypeptide that is incapable of associating with a J chain. According to such embodiments, for example, two or more residues from the C-terminus of an IgA CH3 constant region polypeptide such as a human IgA CH3 constant region polypeptide may be deleted to yield a truncated CH3 constant region polypeptide as provided herein. In preferred embodiments and as described in greater detail herein, a mutated human IgA CH3 constant region polypeptide that is incapable of associating with a J chain comprises such a C-terminal deletion of either four or 18 amino acids. However, the invention need not be so limited, such that the mutated IgA CH3 constant region polypeptide may comprise a deletion of about 2, 3, 4, 5, 6, 7, 8, 9, 10, 11, 12, 13, 14, 15, 16, 17, 18, 19, 20, 21-25, 26-30 or more amino acids, so long as the construct, for example, the fusion protein, is capable of specifically binding an antigen and of at least one immunological activity as provided herein. Alternatively, the invention also contemplates constructs, for example, fusion proteins, having a tail region that comprises a mutated IgA CH3 constant region polypeptide that is incapable of associating with a J chain by virtue of replacement of the penultimate cysteine, or by chemical modification of that amino acid residue, in a manner that prevents, or inhibits an undesired level of, interchain disulfide bond or multimer formation. Methods for determining whether a construct, for example a fusion protein, can associate with a J chain will be known to those having familiarity with the art and are described or referenced herein.

[0373] As also described herein and according to procedures known in the art, the construct, for example a fusion protein, may further be tested routinely for immunological activity, for instance, in ADCC or CDC assays. As an illustrative example, a construct, for example a fusion protein, according to such an embodiment may comprise a binding domain polypeptide derived or constructed from (or using) a native or engineered human heavy chain variable region polypeptide sequence, a native or engineered human IgA-derived immunoglobulin hinge region polypeptide sequence, a native or engineered human IgG1 immunoglobulin heavy chain CH2 constant region polypeptide sequence, a native or engineered human IgG2 immunoglobulin heavy chain CH3 constant region polypeptide sequence, and optionally a native or engineered human IgE immunoglobulin heavy chain CH4 constant region polypeptide sequence and/or a native or engineered human TNF-α receptor type 1 (TNFR1) plasma membrane anchor domain polypeptide sequence that comprises a cytoplasmic tail polypeptide which is capable of apoptotic signaling or otherwise promoting apoptosis. The invention therefore contemplates these and other embodiments according to the present invention in which two or more polypeptide sequences that are present in a construct, for example a fusion protein, have independent genetic origins.

[0374] As noted above, in certain embodiments the construct, for example a binding protein-immunoglobulin fusion protein, comprises at least one native or engineered immunoglobulin variable region polypeptide, which may be a native or engineered light chain or a native or engineered heavy chain variable region polypeptide, and in certain embodiments the fusion protein comprises at least one such native or engineered light chain V-region and one such native or engineered heavy chain V-region and at least one linker peptide that is fused or otherwise connected to to each of the native or engineered V-regions. Construction of such binding domains, for example single chain Fv domains, is known in the art and is described in greater detail in the Examples below, and has been described, for example, in various documents cited herein; selection and assembly of single-chain variable regions and of linker polypeptides that may be fused or otherwise connected to each of a heavy chain-derived and a light chain-derived V region (e.g., to generate a binding region, such as a binding domain that comprises a single-chain Fv polypeptide) is also known to the art and described herein. See, e.g., U.S. Pat. Nos. 5,869,620, 4,704,692, and 4,946,778. In certain embodiments all or a portion or portions of an immunoglobulin sequence that is derived from a non-human source may be “humanized” according to recognized procedures for generating humanized antibodies, i.e., immunoglobulin sequences into which human Ig sequences are introduced to reduce the degree to which a human immune system would perceive such proteins as foreign (see, e.g., U.S. Pat. Nos. 5,693,762; 5,585,089; 4,816,567; 5,225,539; 5,530,101; and documents cited therein).

[0375] Constructs of the invention, including binding domain-immunoglobulin fusion proteins, as described herein may, according to certain embodiments, desirably comprise sites for glycosylation, e.g., covalent attachment of carbohydrate moieties such as, for example, monosaccharides or oligosaccharides. Incorporation of amino acid sequences that provide substrates for polypeptide glycosylation is within the scope of the relevant art, including, for example, the use of genetic engineering or protein engineering methodologies to obtain a polypeptide sequence containing, for example, the classic Asn-X-Ser/Thr site for N-(asparagine)-linked glycosylation, or a sequence containing Ser or Thr residues that are suitable substrates for O-linked glycosylation, or sequences amenable to C-mannosylation, glypiation/glycosylphosphatidylinositol modification, or phosphoglycation, all of which can be identified according to art-established criteria (e.g., Spiro, 2002 Glybiology 12: 43R). Without wishing to be bound by any particular theory or mechanism, glycosylated constructs such as fusion proteins having particular amino acid sequences may beneficially possess attributes associated with one or more of improved solubility, enhanced stability in solution, enhanced physiological stability, improved bioavailability including in vivo biodistribution, and superior resistance to proteases, all in a statistically significant manner, relative to constructs, including fusion proteins, having the same or highly similar amino acid sequences but lacking glycosyl moieties. In certain preferred embodiments the subject invention constructs, such as fusion protein constructs, may comprise a glycosylation site that is present in a linker as provided herein, and in certain other preferred embodiments the subject invention construct, for example, a fusion protein, comprises a glycosylation site that is present in a connecting region, such as a hinge region polypeptide sequence as provided herein.

[0376] In certain preferred embodiments of the present invention, such as those useful for gene therapy applications or in display systems or assays, such as screening assays (including library display systems and library screeening assays), the construct, for example, a binding domain-immunoglobulin fusion protein, is a protein or glycoprotein that is capable of being expressed by a host cell such that it localizes to the cell surface. Constructs, such as binding domain-immunoglobulin fusion proteins, that localize to the cell surface may do so by virtue of having naturally present or artificially introduced structural features that direct the fusion protein to the cell surface (e.g., Nelson et al. 2001 Trends Cell Biol. 11: 483; Ammon et al., 2002 Arch. Physiol. Biochem. 110: 137; Kasai et al., 2001 J. Cell Sci. 114: 3115; Watson et al., 2001 Am. J. Physiol. Cell Physiol. 281: C215; Chatterjee et al., 200 J. Biol. Chem. 275: 24013) including by way of illustration and not limitation, secretory signal sequences, leader sequences, plasma membrane anchor domain polypeptides and transmembrane domains such as hydrophobic transmembrane domains (e.g., Heuck et al., 2002 Cell Biochem. Biophys. 36: 89; Sadlish et al., 2002 Biochem J. 364: 777; Phoenix et al., 2002 Mol. Membr. Biol. 19: 1; Minke et al., 2002 Physiol. Rev. 82: 429) or glycosylphosphatidylinositol attachment sites (“glypiation” sites, e.g., Chatterjee et al., 2001 Cell Mol. Life Sci. 58: 1969; Hooper, 2001 Proteomics 1: 748; Spiro, 2002 Glycobiol. 12: 43R), cell surface receptor binding domains, extracellular matrix binding domains, or any other structural feature that causes at least a desired portion of the fusion protein population to localize, in whole or in part, to the cell surface. Particularly preferred are fusion protein constructs that comprise a plasma membrane anchor domain which includes a transmembrane polypeptide domain, typically comprising a membrane spanning domain which includes a hydrophobic region capable of energetically favorable interaction with the phospholipid fatty acyl tails that form the interior of the plasma membrane bilayer. Such features are known to those of ordinary skill in the art, who will further be familiar with methods for introducing nucleic acid sequences encoding these features into the subject expression constructs by genetic engineering, and with routine testing of such constructs to verify cell surface localization of the product.

[0377] According to certain further embodiments, a plasma membrane anchor domain polypeptide comprises such a transmembrane domain polypeptide and also comprises a cytoplasmic tail polypeptide, which refers to a region or portion of the polypeptide sequence that contacts the cytoplasmic face of the plasma membrane and/or is in contact with the cytosol or other cytoplasmic components. A large number of cytoplasmic tail polypeptides are known that comprise the intracellular portions of plasma membrane transmembrane proteins, and discrete functions have been identified for many such polypeptides, including biological signal transduction (e.g., activation or inhibition of protein kinases, protein phosphatases, G-proteins, cyclic nucleotides and other second messengers, ion channels, secretory pathways), biologically active mediator release, stable or dynamic association with one or more cytoskeletal components, cellular differentiation, cellular activation, mitogenesis, cytostasis, apoptosis and the like (e.g., Maher et al., 2002 Immunol. Cell Biol. 80: 131; El Far et al., 2002 Biochem J 365: 329; Teng et al., 2002 Genome Biol. 2REVIEWS: 3012; Simons et al., 2001 Cell Signal 13: 855; Furie et al., 2001 Thromb. Haemost. 86: 214; Gaffen, 2001 Cytokine 14: 63; Dittel, 2000 Arch. Immunol. Ther. Exp. (Warsz.) 48: 381; Parnes et al., 2000 Immunol. Rev. 176: 75; Moretta et al., 2000 Semin. Immunol. 12: 129; Ben Ze'ev, 1999 Ann. N.Y. Acad. Sci. 886: 37; Marsters et al., Recent Prog Horm. Res. 54: 225).

[0378] FIG. 70 illustrates the binding, for example, of fluorceine-conjugated FcRIII (CD16) soluble fusion proteins to 2H7 scFv-binding domain constructs that are attached to CD20 expressed by cells, CHO cells in this example. CD16 binding to a construct of the invention, for example, scFv-binding domain construct, provides one example of a screening tool that may be used to detect and/or quantitate changes in CD16 binding to altered constructs of the invention, including scFv-binding domain constructs, that contains targeted or site-specific mutations, substitutions, deletions, or other alterations. Changes in CD16 binding properties may be reflected, for example, by changes in binding of either CD16 high affinity protein (158 V) or CD16 low affinity protein (158 F) or both.

[0379] A schematic representation of one example of such a screening process is diagrammed in the second drawing in FIG. 70, in which scFv-binding domain constructs are displayed on the cell surface of mammalian cells scFv-binding domain molecules in this example are displayed on the cell surface through a molecule that serves as a transmembrane domain anchor. These molecules may represent, for example, a single scFv-binding domain construct or may be introduced into a population of mammalian cells as a library of such molecules. Transfected cells with altered binding properties can then, for example, be panned, sorted, or otherwise isolated from other cells by altering the stringency of the selection conditions and using CD16 fusion proteins as a binding probe. Cells that express scFv-Ig molecules with altered binding to either CD 16 high affinity allele (158 V) or CD16 low affinity allele (158F) or both, for example, can be isolated.

[0380] This display system can be used, for example, to create a library of constructs of the invention with mutated or otherwise altered tail regions with short stretches of CH2 sequence replaced with randomized oligonucleotides or, for example, randomization of a single residue with all possible amino acid substitutions, natural or unnatural, including synthetic amino acids. Once such a library is constructed, it can be transfected into appropriate cells, for example, COS cells, by methods known in the art. Transfectants can then be bound to, for example, labeled CD16 constructs, and panned or sorted based on their relative or desired binding properties to multiple allelotypes/isoforms. Desired cells may be harvested, and the DNA, for example, plasmid DNA, isolated and then transformed into, for example, bacteria. This process may be repeated iteratively multiple times until desire single clones are isolated from the mammalian host cells. See Seed B and Aruffo A, Pro. Nat'l Acad Sci USA 1987 84: 3365-3369; Aruffo A and Seed B, Pro. Nat'l Acad Sci USA 1987 84: 8573-8577.

[0381] One such use of this type of screening system, for example, is for the identification and/or isolation of constructs of the invention having tail regions, or tail regions, that bind equally well to both the high and low affinity alleles of CD16 with the goal of improving effector functions mediated by scFv-binding domain constructs in multiple subpopulations of patients. Constructs of the invention having tail regions, or tail regions with altered binding properties to other Fc receptors can also be selected using such a display system, for example, the display system described. Other display systems that do not glycosylate proteins, for example, those that use bacteriophage or yeast, are not generally desired for selection of constructs of the invention having Ig-based tail regions, or Ig-based tail regions, with altered FcR binding properties. Most non-mammalian systems, for example, do not glycosylate proteins.

[0382] Expression of constructs of the invention, for example, scFv-binding domain constructs, expressd on the surface of a mammalian cell by incorporation of an appropriate molecule into the construct, for example, by incorporation of a transmembrane domain or a GPI anchor signal, also have utility in other display systems that are usefu, for example, for selection of constructs of the invention, for example, altered scFv-binding domain molecules that will be produced at higher or other desired levels. In one such an embodiment, cells that are useful in the production of glycosylated proteins, for example, mammalian cells such as COS cells, are transfected with a library of scFv-binding domain constructs in a plasmid that directs their expression to the cell surface. Cells, such as COS cells, that express the highest or other desired level of the scFv-binding domain molecules are selected by techniques known in the art (for example panning, sterile cell sorting, magnetic bead separation, etc.), and DNA, for example, plasmid DNA, is isolated for transformation into other cells, for example, bacteria. After one or more rounds of selection single clones are isolated that encode scFv-binding domain molecules capable of a high or other desired level of expression. The isolated clones may then be altered to remove the membrane anchor and expressed in an appropriate cells system, for example, a mammalian cell system, wherein the scFv-binding domain constructs will be produced, for example, by secretion into the culture fluid at desired levels. Without being bound by any particular mechanism or theory, this is believed to result from the common requirement of secreted glycoproteins and cell surface glycoproteins for a signal peptide and processing through the golgi for expression. Thus, selection for a molecule that shows an improvement expression levels on a cell surface will also result in the identification of a molecule having an improvement in levels of secreted protein.

[0383] These display systems utilizing a construct of the invention may also be used for screening and/or identifying and/or isolating affinity variants of the binding domain within a construct.

[0384] Particuarly preferred are such display and/or screening systems, for example, that include or use constructs that include (1) an immunoglobulin variable region polypeptide sequence, including native or engineered V_{H} and/or V_{L} and/or single-chain variable region (sFv) sequences, and which include, for example, a mutation, alteration or deletion at an amino acid at a location or locations corresponding to one or more of amino acid positions 9, 10, 11, 12, 108, 110, 111, and 112, in a V_{H} region sequence (including in a VH region sequence within an scFv or other construct), and/or (2) an immunoglobulin variable region polypeptide sequence, including native or engineered V_{H} and/or V_{L} and/or single-chain variable region (sFv) sequences, and which include, for example, a a mutation, alteration or deletion at a location or locations corresponding to one or more of amino acid positions 12, 80, 81, 82, 83, 105, 106, 107 and 108 in a light chain variable region sequence (including in a V_{L} region sequence within an scFv or other construct). Especially preferred are such display and/or screening systems that include or use constructs that include an engineered V_{H} sequence (whether or not associated with one or more other sequences, including immunoglobulin-derived and other sequences contained, for example, within an sFv or scFv-containing construct), which includes a mutation, alteration or deletion at an amino acid at a location or locations corresponding to amino acid position 11. The V_{H} 11 amino acid, if substituted, may be substituted with another amino acid as described herein, or by another molecule as desired.

[0385] In the context of other methods of using constructs of the invention, including binding domain-immunoglobulin fusion proteins, for the treatment of a malignant condition or a B cell disorder(s) as provided herein, including, for example, by one or more of a number of gene therapy methods and related construct delivery techniques, the present invention also contemplates certain embodiments wherein a construct, for example, a binding domain-immunoglobulin fusion protein that comprises a plasma membrane anchor domain polypeptide is expressed (or capable or expression) at a cell surface and may further comprise a cytoplasmic tail polypeptide which comprises an apoptosis signaling polypeptide sequence. A number of apoptosis signaling polypeptide sequences are known to the art, as reviewed, for example, in When Cells Die: A Comprehensive Evaluation of Apoptosis and Programmed Cell Death (B.A. Lockshin et al., Eds., 1998 John Wiley & Sons, New York; see also, e.g., Green et al., 1998 Science 281: 1309 and references cited therein; Ferreira et al., 2002 Clin. Canc. Res. 8: 2024; Gurumurthy et al., 2001 Cancer Metastas. Rev. 20: 225; Kanduc et al., 2002 Int. J. Oncol. 21: 165). Typically an apoptosis signaling polypeptide sequence comprises all or a portion of, or is derived or constructed from, a receptor death domain polypeptide, for instance, FADD (e.g., Genbank Acc. Nos. U24231, U43184, AF009616, AF009617, NM_{—}012115), TRADD (e.g., Genbank Acc. No. NM_{—}003789), RAIDD (e.g., Genbank Acc. No. U87229), CD95 (FAS/Apo-1; e.g., Genbank Acc. Nos. X89101, NM-003824, AF344850, AF344856), TNF-α-receptor-1 (TNFR1, e.g., Genbank Acc. Nos. S63368, AF040257), DR5 (e.g., Genbank Acc. No. AF020501, AF016268, AF012535), an ITIM domain (e.g., Genbank Acc. Nos. AF081675, BC015731, NM_{—}006840, NM_{—}006844, NM_{—}006847, XM_{—}017977; see, e.g., Billadeau et al., 2002 J. Clin. Invest. 109: 161), an ITAM domain (e.g., Genbank Acc. Nos. NM_{—}005843, NM_{—}003473, BC030586; see, e.g., Billadeau et al., 2002), or other apoptosis-associated receptor death domain polypeptides known to the art, for example, TNFR2 (e.g., Genbank Acc. No. L49431, L49432), caspase/procaspase-3 (e.g., Genbank Acc. No. XM_{—}54686), caspase/procaspase-8 (e.g., AF380342, NM_{—}004208, NM_{—}001228, NM_{—}033355, NM_{—}033356, NM_{—}033357, NM_{—}033358), caspase/procaspase-2 (e.g., Genbank Acc. No. AF314174, AF314175), etc.

[0386] Cells in a biological sample that are suspected of undergoing apoptosis may be examined for morphological, permeability or other changes that are indicative of an apoptotic state. For example by way of illustration and not limitation, apoptosis in many cell types may cause altered morphological appearance such as plasma membrane blebbing, cell shape change, loss of substrate adhesion properties or other morphological changes that can be readily detected by a person having ordinary skill in the art, for example by using light microscopy. As another example, cells undergoing apoptosis may exhibit fragmentation and disintegration of chromosomes, which may be apparent by microscopy and/or through the use of DNA-specific or chromatin-specific dyes that are known in the art, including fluorescent dyes. Such cells may also exhibit altered plasma membrane permeability properties as may be readily detected through the use of vital dyes (e.g., propidium iodide, trypan blue) or by the detection of lactate dehydrogenase leakage into the extracellular milieu. These and other means for detecting apoptotic cells by morphologic criteria, altered plasma membrane permeability, and related changes will be apparent to those familiar with the art.

[0387] In another embodiment of the invention wherein a construct, such as a binding domain-immunoglobulin fusion protein, that is expressed at a cell surface comprises a plasma membrane anchor domain having a transmembrane domain and a cytoplasmic tail that comprises an apoptosis signaling polypeptide, cells in a biological sample may be assayed for translocation of cell membrane phosphatidylserine (PS) from the inner to the outer leaflet of the plasma membrane, which may be detected, for example, by measuring outer leaflet binding by the PS-specific protein annexin. Martin et al., J. Exp. Med. 182: 1545, 1995; Fadok et al., J. Immunol. 148: 2207, 1992. In still other related embodiments of the invention, including embodiments wherein a construct, such as a binding domain-immunoglobulin fusion protein, is expressed at the cell surface and comprises a plasma membrane anchor domain having an apoptosis signaling polypeptide and also including embodiments wherein the construct, such as a binding domain-immunoglobulin fusion protein, is a soluble protein that lacks a membrane anchor domain and that is capable of inducing apoptosis, a cellular response to an apoptogen is determined by an assay for induction of specific protease activity in any member of a family of apoptosis-activated proteases known as the caspases (see, e.g., Green et al., 1998 Science 281: 1309). Those having ordinary skill in the art will be readily familiar with methods for determining caspase activity, for example by determination of caspase-mediated cleavage of specifically recognized protein substrates. These substrates may include, for example, poly-(ADP-ribose) polymerase (PARP) or other naturally occurring or synthetic peptides and proteins cleaved by caspases that are known in the art (see, e.g., Ellerby et al., 1997 J. Neurosci. 17: 6165). The synthetic peptide Z-Tyr-Val-Ala-Asp-AFC (SEQ ID NO:______;), wherein “Z” indicates a benzoyl carbonyl moiety and AFC indicates 7-amino-4-trifluoromethylcoumarin (Kluck et al., 1997 Science 275: 1132; Nicholson et al., 1995 Nature 376: 37), is one such substrate. Other non-limiting examples of substrates include nuclear proteins such as U1-70 kDa and DNA-PKcs (Rosen and Casciola-Rosen, 1997 J. Cell. Biochem. 64: 50; Cohen, 1997 Biochem. J. 326: 1). Cellular apoptosis may also be detected by determination of cytochrome c that has escaped from mitochondria in apoptotic cells (e.g., Liu et al., Cell 86: 147, 1996). Such detection of cytochrome c may be performed spectrophotometrically, immunochemically or by other well established methods for determining the presence of a specific protein. Persons having ordinary skill in the art will readily appreciate that there may be other suitable techniques for quantifying apoptosis.

[0388] Particuarly preferred embodiments of constructs useful for gene therapy applications, including those constructs that include a plasma membrane anchor domain and/or cytoplasmic tail polypeptide (including, for example, an apoptosis signaling sequence), are such constructs that include (1) an immunoglobulin variable region polypeptide sequence, including native or engineered V_{H} and/or V_{L} and/or single-chain variable region (sFv) sequences, and which include, for example, a mutation, alteration or deletion at an amino acid at a location or locations corresponding to one or more of amino acid positions 9, 10, 11, 12, 108, 110, 111, and 112, in a V_{H} region sequence (including in a V_{H} region sequence within an scFv or other construct), and/or (2) an immunoglobulin variable region polypeptide sequence, including native or engineered V_{H} and/or V_{L} and/or single-chain variable region (sFv) sequences, and which include, for example, a a mutation, alteration or deletion at a location or locations corresponding to one or more of amino acid positions 12, 80, 81, 82, 83, 105, 106, 107 and 108 in a light chain variable region sequence (including in a V_{L} region sequence within an scFv or other construct). Especially preferred are constructs that include an engineered V_{H} sequence (whether or not associated with one or more other sequences, including immunoglobulin-derived and other sequences contained, for example, within an sFv or scFv-containing construct), which includes a mutation, alteration or deletion at an amino acid at a location or locations corresponding to amino acid position 11. The V_{H} 11 amino acid, if substituted, may be substituted with another amino acid as described herein, or by another molecule as desired.

[0389] Once a construct, such as for example a binding domain-immunoglobulin fusion protein, as provided herein has been designed, polynucleotides including DNAs encoding the construct, where it or a relevant portion of it is a polypeptide, may be synthesized in whole or in part via oligonucleotide synthesis as described, for example, in Sinha et al., Nucleic Acids Res., 12: 4539-4557 (1984); assembled via PCR as described, for example in Innis, Ed., PCR Protocols, Academic Press (1990) and also in Better et al. J. Biol. Chem. 267: 16712-16118 (1992); cloned and expressed via standard procedures as described, for example, in Ausubel et al., Eds., Current Protocols in Molecular Biology, John Wiley & Sons, New York (1989) and also in Robinson et al., Hum. Antibod. Hybridomas, 2: 84-93 (1991); and tested for desired activity, for example, binding to a target, or specific antigen binding activity, as described, for example, in Harlow et al., Eds., Antibodies: A Laboratory Manual, Chapter 14, Cold Spring Harbor Laboratory, Cold Spring Harbor (1988) and Munson et al., Anal. Biochem., 107: 220-239 (1980).

[0390] The preparation of single polypeptide chain binding molecules of the Fv region, single-chain Fv molecules, is known in the art. See, e.g., U.S. Pat. No. 4,946,778. In the present invention, single-chain Fv-like molecules that may be included in constructs of the invention may be synthesized by encoding a first variable region of the heavy or light chain, followed by one or more linkers to the variable region of the corresponding light or heavy chain, respectively. The selection of various appropriate linker(s) between the two variable regions is described in U.S. Pat. No. 4,946,778 (see also, e.g., Huston et al., 1993 Int. Rev. Immunol. 10: 195). An exemplary linker described herein is (Gly-Gly-Gly-Gly-Ser)₃, but may be of any desired length. The linker is used to convert the naturally aggregated but chemically separate heavy and light chains into the amino terminal antigen binding portion of a single polypeptide chain, for example, wherein this antigen binding portion will fold into a structure similar to the original structure made of two polypeptide chains, or that otherwise has the ability to bind to a target, for example a target antigen. For those constructs that include an scFv as a binding region, a native or engineered immunoglobulin hinge as a connecting region, and one or more native or engineered heavy chain constant regions as a binding region, nucleotide sequences encoding the variable regions of native or engineered heavy and light chains, joined by a sequence encoding a linker, are joined to a nucleotide sequence encoding native or engineeredantibody constant regions, as desired. The constant regions may be those that permit the resulting polypeptide to form interchain disulfide bonds to form a dimer, and which contain desired effector functions, such as the ability to mediate ADCC, CDC, or fix complement, although native or engineered constant regions that do not favor dimer or other multimer fomation or aggregation are preferred. For a construct, such as an immunoglobulin-like molecule, of the invention that is intended for use in humans, the included sequences having constant regions and/or desired constant regions function(s) will typically be human or substantially human or humanized to minimize a potential anti-human immune response and to provide appropriate or desired effector functions. Manipulation of sequences encoding antibody constant regions is referenced in the PCT publication of Morrison and Oi, WO 89/07142. In preferred embodiments, the CH1 domain is deleted in whole or in part from a tail region that includes, or consists essentially of, or consists of, a native or engineered immunoglobulin constant region(s) (for example, native or engineered CH2 and/or CH3 constant region(s), or native or engineered CH2 and/or CH3 and/or CH4 constant region(s)), and the carboxyl end of the binding region, for example, a binding domain polypeptide such as an immunoglobulin variable region polypeptide, is joined to the amino terminus of, for example, a CH2 via a connecting region, for example, a native or engineered hinge region polypeptide as provided herein.

[0391] As described above, the present invention provides recombinant expression constructs capable of directing the expression of constructs of the invention, including binding domain-immunoglobulin fusion proteins, as provided herein. The amino acids, which occur in the various amino acid sequences referred to herein, are identified according to their well known three-letter or single-letter abbreviations. The nucleotides, which occur in the various DNA sequences or fragments thereof referred herein, are designated with the standard single letter designations used routinely in the art. A given amino acid sequence may also encompass similar but changed amino acid sequences, such as those having only minor changes, for example by way of illustration and not limitation, covalent chemical modifications, insertions, deletions and substitutions, which may further include conservative substitutions or substitutions with non-naturally-occuring amino acids. Amino acid sequences that are similar to one another may share substantial regions of sequence homology. In like fashion, nucleotide sequences may encompass substantially similar nucleotide sequences having only minor changes, for example by way of illustration and not limitation, covalent chemical modifications, insertions, deletions and substitutions, which may further include silent mutations owing to degeneracy of the genetic code. Nucleotide sequences that are similar to one another may share substantial regions of sequence homology.

[0392] The presence of a malignant condition in a subject refers to the presence of dysplastic, cancerous, and/or transformed cells in the subject, including, for example, neoplastic, tumor, non-contact inhibited, or oncogenically transformed cells, or the like (e.g., melanoma, carcinomas such as adenocarcinoma, squamous cell carcinoma, small cell carcinoma, oat cell carcinoma, etc., sarcomas such as chondrosarcoma, osteosarcoma, etc.) which are known to the art and for which criteria for diagnosis and classification are established. In preferred embodiments contemplated by the present invention, for example, such cancer cells are malignant hematopoietic cells, such as transformed cells of lymphoid lineage and in particular, B cell lymphomas and the like; cancer cells may in certain preferred embodiments also be epithelial cells such as carcinoma cells. The invention also contemplates B cell disorders, which may include certain malignant conditions that affect B cells (e.g., B cell lymphoma) but which is not intended to be so limited, and which is also intended to encompass autoimmune diseases and in particular, diseases, disorders and conditions that are characterized by autoantibody production, for example.

[0393] Autoantibodies are antibodies that react with self antigens. Autoantibodies are detected in several autoimmune diseases (i.e., a disease, disorder or condition wherein a host immune system generates an inappropriate anti-“self” immune reaction) where they are involved in disease activity. Current treatments for various autoimmune diseases include immunosuppressive drugs that require continuing administration, lack specificity, and cause significant side effects. New approaches that can eliminate autoantibody production with minimal toxicity will address an unmet medical need for a spectrum of diseases that affect many people. Constructs of the subject invention, including binding domain-immunoglobulin fusion proteins, are designed, for example, for improved penetration into lymphoid tissues. Depletion of B lymphocytes interrupts the autoantibody production cycle, and allows the immune system to reset as new B lymphocytes are produced from precursors in the bone marrow.

[0394] A number of diseases, disorders, and conditions have been identified for which beneficial effects are believed, according to non-limiting theory, to result from B cell depletion therapy. Such diseases disorders, and conditions include, but are not limited to, Grave's disease, Hashimoto's disease, rheumatoid arthritis, systemic lupus erythematosus, Sjogrens Syndrome Immune Thrombocytopenic purpura, multiple sclerosis, myasthenia gravis, scleroderma, psoriasis, Inflamatory Bowel Disease including Crohn's disease and ulcerative colitis. Inflamatory Bowel Disease including Crohn's disease and Ulcerative colitis, are autoimmune diseases of the digestive system.

[0395] The present invention further relates to nucleotide constructs encoding constructs of the invention, for example, binding domain-immunoglobulin fusion proteins, and in particular to methods for administering recombinant constructs encoding such proteins for gene therapy applications that may be expressed, for example, as fragments, analogs and derivatives of such polypeptides.

[0396] The terms “fragment,” “derivative” and “analog” when referring to constructs of the invention including, for example, binding domain-immunoglobulin fusion polypeptides or fusion proteins, refers to any construct, such as a binding domain-immunoglobulin fusion polypeptide or fusion protein, that retains essentially the same biological function or activity as such polypeptide. Thus, an analog includes a pro- or prepro-form of a construct, for example, a pro-protein that can be activated by cleavage of the pro-protein portion to produce an active construct, such as a binding domain-immunoglobulin fusion polypeptide.

[0397] A fragment, derivative or analog of a construct of the invention, for example, a binding domain-immunoglobulin fusion polypeptide or fusion protein, including binding domain-immunoglobulin fusion polypeptides or fusion proteins encoded by the cDNAs referred to herein, may be (i) one in which one or more of the amino acid residues are substituted with a conserved or non-conserved amino acid residue (preferably a conserved amino acid residue) and such substituted amino acid residue may or may not be one encoded by the genetic code, or (ii) one in which one or more of the amino acid residues includes a substituent group, or (iii) one in which additional amino acids are fused or otherwise connected to the construct, e.g., a binding domain-immunoglobulin fusion polypeptide, including amino acids that are employed for detection or specific functional alteration of the construct, including such constructs as a binding domain-immunoglobulin fusion polypeptide or a proprotein sequence. Such fragments, derivatives and analogs are deemed to be within the scope of those skilled in the art from the teachings herein.

[0398] The constructs, including polypeptide constructs, of the present invention include, for example, binding domain-immunoglobulin fusion polypeptides and fusion proteins having binding regions such as binding domain polypeptide amino acid sequences that are identical or similar to sequences known in the art, or fragments or portions thereof. For example by way of additional illustration and not limitation, a human CD154 molecule extracellular domain [SEQ ID NO:______] is contemplated for use according to the instant invention, as are portions of such polypeptides and/or polypeptides having at least about 70% similarity (preferably greater than a 70% identity) and more preferably about 90% similarity (more preferably greater than a 90% identity) to the reported polypeptide and still more preferably about 95% similarity (still more preferably greater than a 95% identity) to the reported polypeptides and to portions of such polypeptides, wherein such portions of a binding domain-immunoglobulin fusion polypeptide, for example, generally contain at least about 30 amino acids and more preferably at least about 50 amino acids. Extracellular domains include, for example, portions of a cell surface molecule, and in particularly preferred embodiments cell surface molecules that are integral membrane proteins or that comprise a plasma membrane spanning transmembrane domain, that are constructed to extend beyond the outer leaflet of the plasma membrane phospholipid bilayer when the molecule is expressed at a cell surface, preferably in a manner that exposes the extracellular domain portion of such a molecule to the external environment of the cell, also known as the extracellular milieu. Methods for determining whether a portion of a cell surface molecule comprises an extracellular domain are well known to the art and include, for example, experimental determination (e.g., direct or indirect labeling of the molecule, evaluation of whether the molecule can be structurally altered by agents to which the plasma membrane is not permeable such as proteolytic or lipolytic enzymes) or topological prediction based on the structure of the molecule (e.g., analysis of the amino acid sequence of a polypeptide) or other methodologies.

[0399] As used herein, an “amino acid” is a molecule having the structure wherein a central carbon atom (the alpha (α)-carbon atom) is linked to a hydrogen atom, a carboxylic acid group (the carbon atom of which is referred to herein as a “carboxyl carbon atom”), an amino group (the nitrogen atom of which is referred to herein as an “amino nitrogen atom”), and a side chain group, R. When incorporated into a peptide, polypeptide, or protein, an amino acid loses one or more atoms of its amino and carboxylic groups in the dehydration reaction that links one amino acid to another. As a result, when incorporated into a protein, an amino acid may also be referred to as an “amino acid residue.” In the case of naturally occurring proteins, an amino acid residue's R group differentiates the 20 amino acids from which proteins are typcially synthesized, although one or more amino acid residues in a protein may be derivatized or modified following incorporation into protein in biological systems (e.g., by glycosylation and/or by the formation of cystine through the oxidation of the thiol side chains of two non-adjacent cysteine amino acid residues, resulting in a disulfide covalent bond that frequently plays an important role in stabilizing the folded conformation of a protein, etc.). As those in the art will appreciate, non-naturally occurring amino acids can also be incorporated into proteins, particularly those produced by synthetic methods, including solid state and other automated synthesis methods. Examples of such amino acids include, without limitation, α-amino isobutyric acid, 4-amino butyric acid, L-amino butyric acid, 6-amino hexanoic acid, 2-amino isobutyric acid, 3-amino propionic acid, ornithine, norlensine, norvaline, hydroxproline, sarcosine, citralline, cysteic acid, t-butylglyine, t-butylalanine, phenylylycine, cyclohexylalanine, β-alanine, fluoro-amino acids, designer amino acids (e.g., P-methyl amino acids, α-methyl amino acids, Na-methyl amino acids) and amino acid analogs in general. In addition, when an α-carbon atom has four different groups (as is the case with the 20 amino acids used by biological systems to synthesize proteins, except for glycine, which has two hydrogen atoms bonded to the a carbon atom), two different enantiomeric forms of each amino acid exist, designated D and L. In mammals, only L-amino acids are incorporated into naturally occurring polypeptides. The instant invention envisions proteins incorporating one or more D- and L-amino acids, as well as proteins comprised of just D- or L-amino acid residues.

[0400] Herein, the following abbreviations may be used for the following amino acids (and residues thereof): alanine (Ala, A); arginine (Arg, R); asparagine (Asn, N); aspartic acid (Asp, D); cyteine (Cys, C); glycine (Gly, G); glutamic acid (Glu, E); glutamine (Gln, Q); histidine (His, H); isoleucine (Ile, I); leucine (Leu, L); lysine (Lys, K); methionine (Met, M); phenylalanine (Phe, F); proline (Pro, P); serine (Ser, S); threonine (Thr, T); tryptophan (Trp, W); tyrosine (Tyr, Y); and valine (Val, V). Non-polar (hydrophobic) amino acids include alanine, leucine, isoleucine, valine, proline, phenylalanine, tryptophan, and methionines. Neutral amino acids include glycine, serine, threonine, cysteine, tyrosine, esparagine, and glutamine. Positively charged (basic amino acids include arginine, lysine and histidine. Negatively charged (acidic) amino acids include aspartic acid and glutamic acid.

[0401] “Protein” refers to any polymer of two or more individual amino acids (whether or not naturally occurring) linked via a peptide bond, and occurs when the carboxyl carbon atom of the carboxylic acid group bonded to the α-carbon of one amino acid (or amino acid residue) becomes covalently bound to the amino nitrogen atom of amino group bonded to the α-carbon of an adjacent amino acid. The term “protein” is understood to include the terms “polypeptide” and “peptide” (which, at times, may be used interchangeably herein) within its meaning. In addition, proteins comprising multiple polypeptide subunits or other components will also be understood to be included within the meaning of “protein” as used herein. Similarly, fragments of proteins, peptides, and polypeptides are also within the scope of the invention and may be referred to herein as “proteins.”

[0402] In biological systems (be they in vivo or in vitro, including cell-free, systems), the particular amino acid sequence of a given protein (i.e., the polypeptide's “primary structure,” when written from the amino-terminus to carboxy-terminus) is determined by the nucleotide sequence of the coding portion of a mRNA, which is in turn specified by genetic information, typically genomic DNA (which, for purposes of this invention, is understood to include organelle DNA, for example, mitochondrial DNA and chloroplast DNA). Of course, any type of nucleic acid which constitutes the genome of a particular organism (e.g., double-stranded DNA in the case of most animals and plants, single or double-stranded RNA in the case of some viruses, etc.) is understood to code for the gene product(s) of the particular organism. Messenger RNA is translated on a ribosome, which catalyzes the polymerization of a free amino acid, the particular identity of which is specified by the particular codon (with respect to mRNA, three adjacent A, G, C, or U ribonucleotides in the mRNA's coding region) of the mRNA then being translated, to a nascent polypeptide. Recombinant DNA techniques have enabled the large-scale synthesis of proteins and polypeptides (e.g., human insulin, human growth hormone, erythropoietin, granulocyte colony stimulating factor, etc.) having the same primary sequence as when produced naturally in living organisms. In addition, such technology has allowed the synthesis of analogs of these and other proteins, which analogs may contain one or more amino acid deletions, insertions, and/or substitutions as compared to the native proteins. Recombinant DNA technology also enables the synthesis of entirely novel proteins.

[0403] In non-biological systems (e.g., those employing solid state synthesis), the primary structure of a protein (which also includes disulfide (cystine) bond locations) can be determined by the user. As a result, polypeptides having a primary structure that duplicates that of a biologically produced protein can be achieved, as can analogs of such proteins. In addition, completely novel polypeptides can also be synthesized, as can protein incorporating non-naturally occurring amino acids.

[0404] As is known in the art, “similarity” between two polypeptides may be determined by comparing the amino acid sequence (including conserved amino acid substitutes therein) of one polypeptide to the sequence of a second polypeptide. Fragments or portions of the nucleic acids encoding polypeptides of the present invention may be used to synthesize full-length nucleic acids of the present invention. As used herein, “% identity” refers to the percentage of identical amino acids situated at corresponding amino acid residue positions when two or more polypeptide are aligned and their sequences analyzed using, for example, a gapped BLAST algorithm (e.g., Altschul et al., 1997 Nucl. Ac. Res. 25: 3389; Altschul et al., 1990 J. Mol. Biol., 215: 403-410) which weights sequence gaps and sequence mismatches according to the default weightings provided by the National Institutes of Health/NCBI database (Bethesda, Md.; see www.ncbi.nlm.nih.gov/cgi-bin/BLAST/nph-newblast). Other alignment methods include BLITZ (MPsrch) (Sturrock & Collins, 1993), and FASTA (Pearson and Lipman, 1988 Proc. Natl. Acad. Sci. USA. 85: 2444-2448).

[0405] The term “isolated” means, in the case of a naturally occuring material, that the material is or has been removed from, or is no longer associated with, its natural or original environment. For example, a naturally occurring nucleic acid or protein or polypeptide present in a living animal is not isolated, but the same nucleic acid or polypeptide, separated from some or all of the co-existing materials in the natural system, is isolated. Such nucleic acids could be part of a vector and/or such nucleic acids or polypeptides could be part of a composition, and still be isolated in that such vector or composition is not part of its natural environment. The term “isolated”, in the case of non-naturally occuring material, such as a recombinantly manufactured construct of the invention, includes material that is substantially or essentially free from components which normally accompany it during manufacture, such as, for example, proteins and peptides that have been purified to a desired degree, preferably, for example, so that they are at least about 80% pure, more preferably at least about 90%, and still more preferably at least about 95% as measured by techniques known in the art.

[0406] The term “gene” means a segment of DNA involved in producing a polypeptide chain; it may also include regions preceding and following a polypeptide coding region, for example, a “leader and trailer” as well as intervening sequences (introns) between relevant individual coding segments (exons).

[0407] As described herein, the invention provides constructs, including binding domain-immunoglobulin fusion proteins, that may be encoded in whole or in part by nucleic acids that have a binding region coding sequence such as, for example, a binding domain coding sequence fused or otherwise connected in frame to an additional native or engineered immunoglobulin domain encoding sequence to provide for expression of, for example, a binding domain polypeptide sequence fused or otherwise connected to an additional functional polypeptide sequence that permits, for example by way of illustration and not limitation, detection, functional alteration, isolation and/or purification of the fusion protein. Such fusion proteins may permit functional alteration of a binding domain by containing additional immunoglobulin-derived polypeptide sequences that influence behavior of the fusion product, for example (and as described above) by reducing the availability of sufhydryl groups for participation in disulfide bond formation, and by conferring the ability to potentiate ADCC and/or CDC and/or fix complement.

[0408] Modification of a polypeptide may be effected by any means known to those of skill in this art. The preferred methods herein rely on modification of DNA encoding, for example, a fusion protein and expression of the modified DNA. DNA encoding one of the constructs of the invention, for example, one of the binding domain-immunoglobulin fusions discussed herein, for example, may be altered or mutagenized using standard methodologies, including those described below. For example, cysteine residues that may otherwise facilitate multimer formation or promote particular molecular conformations can be deleted from a polypeptide or replaced, e.g., cysteine residues that are responsible for or participate in aggregate formation. If necessary, for example, the identity of cysteine residues that contribute to aggregate formation may be determined empirically, by deleting and/or replacing a cysteine residue and ascertaining whether the resulting protein aggregates in solutions containing physiologically acceptable buffers and salts. In addition, fragments of, for example, binding domain-immunoglobulin fusions may be constructed and used. As noted above, counterreceptor/ligand binding domains for many candidate binding domain-immunoglobulin fusion have been delineated, such that one having ordinary skill in the art may readily select appropriate polypeptide domains for inclusion in encoded products of the instant expression constructs.

[0409] Conservative substitutions of amino acids are well-known and may be made generally without altering the biological activity of the resulting binding domain-immunoglobulin fusion protein molecule. For example, such substitutions are generally made by interchanging within the groups of polar residues, charged residues, hydrophobic residues, small residues, and the like. If necessary, such substitutions may be determined empirically merely by testing the resulting modified protein for the ability to bind to the appropriate cell surface receptors in in vitro biological assays, or to bind to appropriate antigens or desired target molecules.

[0410] The present invention further relates to nucleic acids which hybridize to constructs of the invention, including for example, binding domain-immunoglobulin fusion protein encoding polynucleotide sequences as provided herein, or their complements, as will be readily apparent to those familiar with the art, if there is at least about 70%, preferably at least about 80-85%, more preferably at least about 90%, and still more preferably at least about 95%, 96%, 97%, 98% or 99% identity between the sequences.

[0411] The present invention particularly relates to nucleic acids which hybridize under stringent conditions to, for example, the binding domain-immunoglobulin fusion encoding nucleic acids referred to herein. As used herein, to “hybridize” under conditions of a specified stringency is used to describe the stability of hybrids formed between two single-stranded nucleic acid molecules. Stringency of hybridization is typically expressed in conditions of ionic strength and temperature at which such hybrids are annealed and washed. The term “stringent conditions” refers to conditions that permit hybridization between polynucleotides. Stringent conditions can be defined by salt concentration, the concentration of organic solvent (e.g., formamide), temperature, and other conditions well known in the art. In particular, stringency can be increased by reducing the concentration of salt, increasing the concentration of organic solvents (e.g., formamide), or raising the hybridization temperature. For example, stringent salt concentration will ordinarily be less than about 750 mM NaCl and 75 mM trisodium citrate, preferably less than about 500 mM NaCl and 50 mM trisodium citrate, and most preferably less than about 250 mM NaCl and 25 mM trisodium citrate. Low stringency hybridization can be obtained in the absence of organic solvent, e.g., formamide, while high stringency hybridization can be obtained in the presence of an organic solvent (e.g., at least about 35% formamide, most preferably at least about 50% formamide). Stringent temperature conditions will ordinarily include temperatures of at least about 30° C., more preferably of at least about 37° C., and most preferably of at least about 42° C. Varying additional parameters, for example, hybridization time, the concentration of detergent, e.g., sodium dodecyl sulfate (SDS), and the inclusion or exclusion of carrier DNA, are well known to those skilled in the art. Various levels of stringency are accomplished by combining these various conditions as needed, and are within the skill in the art. Other typical “high”, “medium” and “low” stringency encompass the following conditions or equivalent conditions thereto: high stringency: 0.1×SSPE or SSC, 0.1% SDS, 65-C; medium stringency: 0.2×SSPE or SSC, 0.1% SDS, 50° C.; and low stringency: 1.0×SSPE or SSC, 0.1% SDS, 50° C. As known to those having ordinary skill in the art, variations in stringency of hybridization conditions may be achieved by altering the time, temperature and/or concentration of the solutions used for prehybridization, hybridization and wash steps, and suitable conditions may also depend in part on the particular nucleotide sequences of the probe used, and of the blotted, proband nucleic acid sample. Accordingly, it will be appreciated that suitably stringent conditions can be readily selected without undue experimentation where a desired selectivity of the probe is identified, based on its ability to hybridize to one or more certain proband sequences while not hybridizing to certain other proband sequences.

[0412] As used herein, preferred “stringent conditions” generally refer to hybridization that will occur only if there is at least about 90-95% and more preferably at least about 97% identity between the sequences. The nucleic acid constructs which hybridize to, for example, binding domain-immunoglobulin fusion encoding nucleic acids referred to herein, in preferred embodiments, encode polypeptides which retain substantially the same biological function or activity as, for example, the binding domain-immunoglobulin fusion polypeptides encoded by the cDNAs.

[0413] The nucleic acids of the present invention, also referred to herein as polynucleotides, may be in the form of RNA, for example, mRNA, or in the form of DNA, which DNA includes cDNA (also called “complementary DNA”, which is a DNA molecule that is complementary to a specific messenger RNA), genomic DNA, and synthetic DNA. The DNA may be double-stranded or single-stranded, and if single stranded may be the coding strand or non-coding (anti-sense) strand. A coding sequence which encodes a construct of the invention, for example, a binding domain-immunoglobulin fusion polypeptide for use according to the invention may contain portions that are identical to the coding sequence known in the art or described herein for portions thereof, or may be a different coding sequence, which, as a result of the redundancy or degeneracy of the genetic code, encodes the same construct or portion thereof, including all or a portion of a binding domain-immunoglobulin fusion polypeptide.

[0414] The nucleic acids which encode constructs of the invention, for example, binding domain-immunoglobulin fusion polypeptides, for use according to the invention may include, but are not limited to: only the coding sequence for the construct, such as a binding domain-immunoglobulin fusion polypeptide; the coding sequence for the construct, such as a binding domain-immunoglobulin fusion polypeptide and additional coding sequence; the coding sequence for the construct, such as a binding domain-immunoglobulin fusion polypeptide (and optionally additional coding sequence) and non-coding sequence, such as introns or non-coding sequences 5′ and/or 3′ of the coding sequence for the binding domain-immunoglobulin fusion polypeptide or a portion(s) thereof, which for example may further include but need not be limited to one or more regulatory nucleic acid sequences that may be a regulated or regulatable promoter, enhancer, other transcription regulatory sequence, repressor binding sequence, translation regulatory sequence or any other regulatory nucleic acid sequence. Thus, the term “nucleic acid encoding” or “polynucleotide encoding” a construct, for example, a binding domain-immunoglobulin fusion protein, encompasses a nucleic acid which includes only coding sequence for, for example, a binding domain-immunoglobulin fusion polypeptide as well as a nucleic acid which includes additional coding and/or non-coding sequence(s).

[0415] Nucleic acids and oligonucleotides for use as described herein can be synthesized by any method known to those of skill in this art (see, e.g., WO 93/01286, U.S. application Ser. No. 07/723,454; U.S. Pat. No. 5,218,088; U.S. Pat. No. 5,175,269; U.S. Pat. No. 5,109,124). Identification of various oligonucleotides and nucleic acid sequences also involves methods known in the art. For example, the desirable properties, lengths and other characteristics of oligonucleotides useful for cloning are well known. In certain embodiments, synthetic oligonucleotides and nucleic acid sequences may be designed that resist degradation by endogenous host cell nucleolytic enzymes by containing such linkages as: phosphorothioate, methylphosphonate, sulfone, sulfate, ketyl, phosphorodithioate, phosphoramidate, phosphate esters, and other such linkages that have proven useful in antisense applications. See, e.g., Agrwal et al., Tetrehedron Lett. 28: 3539-3542 (1987); Miller et al., J. Am. Chem. Soc. 93: 6657-6665 (1971); Stec et al., Tetrehedron Lett. 26: 2191-2194 (1985); Moody et al., Nucl. Acids Res. 12: 4769-4782 (1989); Uznanski et al., Nucl. Acids Res. (1989); Letsinger et al., Tetrahedron 40: 137-143 (1984); Eckstein, Annu. Rev. Biochem. 54: 367-402 (1985); Eckstein, Trends Biol. Sci. 14: 97-100 (1989); Stein In: Oligodeoxynucleotides. Antisense Inhibitors of Gene Expression, Cohen, Ed, Macmillan Press, London, pp. 97-117 (1989); Jager et al., Biochemistry 27: 7237-7246 (1988).

[0416] In one embodiment, the present invention provides truncated components (e.g., binding domain polypeptide, hinge region polypeptide, linker, etc.) for use in a construct of the invention, for example, a binding domain-immunoglobulin fusion protein. In another embodiment the invention provides nucleic acids encoding a construct of the invention, for example, a binding domain-immunoglobulin fusion protein having such truncated components. A truncated molecule may be any molecule that comprises less than a full length version of the molecule of interest. Truncated molecules provided by the present invention may include truncated biological polymers, and in preferred embodiments of the invention such truncated molecules may be truncated nucleic acid molecules or truncated polypeptides. Truncated nucleic acid molecules have less than the full length nucleotide sequence of a known or described nucleic acid molecule, where such a known or described nucleic acid molecule may be a naturally occurring, a synthetic, or a recombinant nucleic acid molecule, so long as one skilled in the art would regard it as a full length molecule. Thus, for example, truncated nucleic acid molecules that correspond to a gene sequence contain less than the full length gene where the gene comprises coding and non-coding sequences, promoters, enhancers and other regulatory sequences, flanking sequences and the like, and other functional and non-functional sequences that are recognized as part of the gene. In another example, truncated nucleic acid molecules that correspond to a mRNA sequence contain less than the full length mRNA transcript, which may include various translated and non-translated regions as well as other functional and non-functional sequences.

[0417] In other preferred embodiments, truncated molecules are polypeptides that comprise less than the full length amino acid sequence of a particular protein or polypeptide component. As used herein “deletion” has its common meaning as understood by those familiar with the art, and may refer to molecules that lack one or more portions of a sequence from either terminus or from a non-terminal region, relative to a corresponding full length molecule, for example, as in the case of truncated molecules provided herein. Truncated molecules that are linear biological polymers such as nucleic acid molecules or polypeptides may have one or more of a deletion from either terminus of the molecule and/or one or more deletions from a non-terminal region of the molecule, where such deletions may be deletions of from about 1-1500 contiguous nucleotide or amino acid residues, preferably about 1-500 contiguous nucleotide or amino acid residues and more preferably about 1-300 contiguous nucleotide or amino acid residues, including deletions of about 1, 2, 3, 4, 5, 6, 7, 8, 9, 10, 11, 12, 13, 14, 15, 16, 17, 18, 19, 20, 21, 22, 23, 24, 25, 26, 27, 28, 29, 30, 31-40, 41-50, 51-74, 75-100, 101-150, 151-200, 201-250 or 251-299 contiguous nucleotide or amino acid residues. In certain particularly preferred embodiments truncated nucleic acid molecules may have a deletion of about 270-330 contiguous nucleotides. In certain more preferred embodiments, truncated polypeptide molecules may have a deletion, for example, of about 80-140 contiguous amino acids.

[0418] The present invention further relates to variants of the herein referenced nucleic acids that encode fragments, analogs and/or derivatives of a construct of the invention, for example, a binding domain-immunoglobulin fusion polypeptide. The variants of the nucleic acids encoding constructs of the invention, for example, binding domain-immunoglobulin fusion proteins, may be naturally occurring allelic variants of one or more portions of the the nucleic acid sequences included therein, or non-naturally occurring variants of such sequences or portions or sequences, including sequences varied by molecular engineering using, for example, methods know in the art for varying sequence. As is known in the art, an allelic variant is an alternate form of a nucleic acid sequence which may have at least one of a substitution, a deletion or an addition of one or more nucleotides, any of which does not substantially or undesireably alter the function of the encoded binding domain-immunoglobulin fusion polypeptide.

[0419] Variants and derivatives of constructs of the invention, for example, binding domain-immunoglobulin fusion proteins, may be obtained by mutations of nucleotide sequences encoding, for example, binding domain-immunoglobulin fusion polypeptides or any portion thereof. Alterations of the native amino acid sequence may be accomplished by any of a number of conventional methods. Mutations can be introduced at particular loci, for example, by synthesizing oligonucleotides containing a mutant sequence, flanked by restriction sites enabling ligation to fragments of the native sequence. Following ligation, the resulting reconstructed sequence encodes an analog having the desired amino acid insertion, substitution, or deletion.

[0420] Alternatively, for example, oligonucleotide-directed site-specific mutagenesis procedures can be employed to provide an altered gene wherein predetermined codons can be altered by substitution, deletion or insertion. Exemplary methods of making such alterations are disclosed by Walder et al., 1986 Gene 42: 133; Bauer et al., 1985 Gene 37: 73; Craik, January 1985 BioTechniques 12-19; Smith et al., January 1985 Genetic Engineering: Principles and Methods BioTechniques 12-19; Costa GL, et al., “Site-directed mutagenesis using a rapid PCR-based method,” 1996 Methods Mol. Biol. 57: 239-48; Rashtchian A., “Novel methods for cloning and engineering genes using the polymerase chain reaction,” 1995 Curr Opin Biotechnol. 6(1): 30-6; Sharon J, et al., “Oligonucleotide-directed mutagenesis of antibody combining sites,” 1993 Int Rev Immunol. 10(2-3): 113-27; Kunkel, 1985 Proc. Natl. Acad. Sci. USA 82: 488; Kunkel et al., 1987 Methods in Enzymol. 154: 367; and, U.S. Pat. Nos. 4,518,584 and 4,737,462.

[0421] As an example, modification of DNA may be performed by site-directed mutagenesis of DNA encoding a protein combined with the use of DNA amplification methods using primers to introduce and amplify alterations in the DNA template, such as PCR splicing by overlap extension (SOE). Site-directed mutagenesis is typically effected using a phage vector that has single- and double-stranded forms, such as M13 phage vectors, which are well-known and commercially available. Other suitable vectors that contain a single-stranded phage origin of replication may be used. See, e.g., Veira et al., 1987 Meth. Enzymol. 15: 3. In general, site-directed mutagenesis is performed by preparing a single-stranded vector that encodes the protein of interest (e.g., all or a component portion of a given binding domain-immunoglobulin fusion protein). An oligonucleotide primer that contains the desired mutation within a region of homology to the DNA in the single-stranded vector is annealed to the vector followed by addition of a DNA polymerase, such as E. coli DNA polymerase I (Klenow fragment), which uses the double stranded region as a primer to produce a heteroduplex in which one strand encodes the altered sequence and the other the original sequence. The heteroduplex is introduced into appropriate bacterial cells and clones that include the desired mutation are selected. The resulting altered DNA molecules may be expressed recombinantly in appropriate host cells to produce the modified protein.

[0422] Equivalent DNA constructs that include code for additions or substitutions of amino acid residues or sequences, or deletions of terminal or internal residues or sequences not needed or desired for biological activity, for example, are also encompassed by the invention. For example, and as discussed above, sequences encoding Cys residues that are not desirable or essential for biological activity can be altered to cause the Cys residues to be deleted or replaced with other amino acids, for example, thus preventing formation of incorrect or undesired intramolecular disulfide bridges upon synthesis or renaturation.

[0423] A “host cell” or “recombinant host cell” is a cell that contains a vector, e.g., an expression vector, or a cell that has otherwise been manipulated by recombinant techniques to express a protein of interest. Host organisms include those organisms in which recombinant production of constructs of the invention, for example, binding domain-immunoglobulin fusion products encoded by the recombinant constructs of the present invention may occur, such as bacteria (for example, E. coli), yeast (for example, Saccharomyces cerevisiae and Pichia pastoris), insect cells, and mammalian cells, including in vitro and in vivo expression. Host organisms thus may include organisms for the construction, propagation, expression or other steps in the production of the compositions provided herein. Hosts include subjects in which immune responses take place, as described herein. Presently preferred host organisms for production of constructs of the invention that produce glycosylated proteins are mammalian cells or other cells systems that pemit the expression and recovery of glycosylated proteins. Other cell lines include inbred murine strains and murine cell lines, and human cellsand cell lines.

[0424] A DNA construct encoding a desired construct of the invention, for example, a binding domain-immunoglobulin fusion protein, is introduced into a vector, for example, a plasmid, for expression in an appropriate host. In preferred embodiments, the host is a mammalian host, for example, a mammalian cell line. The sequence encoding the ligand or nucleic acid binding domain is preferably codon-optimized for expression in the particular host. Thus, for example, if a construct, for example, is a human binding domain-immunoglobulin fusion and is expressed in bacteria, the codons may be optimized for bacterial usage. For small coding regions, the gene can be synthesized as a single oligonucleotide. For larger proteins, splicing of multiple oligonucleotides, mutagenesis, or other techniques known to those in the art may be used. The sequences of nucleotides in plasmids or other vectors that are regulatory regions, such as promoters and operators, are operationally associated with one another for transcription. The sequence of nucleotides encoding a binding domain-immunoglobulin fusion protein may also include DNA encoding a secretion signal, whereby the resulting peptide is a precursor protein. The resulting processed protein may be recovered from the periplasmic space or the fermentation medium.

[0425] In preferred embodiments, the DNA plasmids may also include a transcription terminator sequence. As used herein, a “transcription terminator region” is a sequence that signals transcription termination. The entire transcription terminator may be obtained from a protein-encoding gene, which may be the same or different from the inserted binding domain-immunoglobulin fusion encoding gene or the source of the promoter. Transcription terminators are optional components of the expression systems herein, but are employed in preferred embodiments.

[0426] The plasmids or other vectors used herein include a promoter in operative association with the DNA encoding the protein or polypeptide of interest and are designed for expression of proteins in a suitable host as described above (e.g., bacterial, murine, or human) depending upon the desired use of the plasmid (e.g., administration of a vaccine containing binding domain-immunoglobulin fusion encoding sequences). Suitable promoters for expression of proteins and polypeptides herein are widely available and are well known in the art. Inducible promoters or constitutive promoters that are linked to regulatory regions are preferred. Such promoters include, for example, but are not limited to, the T7 phage promoter and other T7-like phage promoters, such as the T3, T5 and SP6 promoters, the trp, lpp, and lac promoters, such as the lacUV5, from E. coli; the P10 or polyhedrin gene promoter of baculovirus/insect cell expression systems (see, e.g., U.S. Pat. Nos. 5,243,041, 5,242,687, 5,266,317, 4,745,051, and 5,169,784) and inducible promoters from other eukaryotic expression systems. For expression of the proteins such promoters are inserted in a plasmid in operative linkage with a control region such as the lac operon.

[0427] Preferred promoter regions are those that are inducible and functional in mammalian cells, for example. Examples of suitable inducible promoters and promoter regions for bacterial expression include, but are not limited to: the E. coli lac operator responsive to isopropyl β-D-thiogalactopyranoside (IPTG; see Nakamura et al., 1979 Cell 18: 1109-1117); the metallothionein promoter metal-regulatory-elements responsive to heavy-metal (e.g., zinc) induction (see, e.g., U.S. Pat. No. 4,870,009); the phage T71ac promoter responsive to IPTG (see, e.g., U.S. Pat. No. 4,952,496; and Studier et al., 1990 Meth. Enzymol. 185: 60-89) and the TAC promoter. Depending on the expression host system to be used, plasmids may optionally include a selectable marker gene or genes that are functional in the host. Thus, for example, a selectable marker gene includes any gene that confers a phenotype on bacteria that allows transformed bacterial cells to be identified and selectively grown from among a vast majority of untransformed cells. Suitable selectable marker genes for bacterial hosts, for example, include the ampicillin resistance gene (Amp^{r}), tetracycline resistance gene (Tc^{r}) and the kanamycin resistance gene (Kan^{r}). The kanamycin resistance gene is presently preferred for bacterial expression.

[0428] In various expression systems, plasmids or other vectors may also include DNA encoding a signal for secretion of the operably linked protein. Secretion signals suitable for use are widely available and are well known in the art. Prokaryotic and eukaryotic secretion signals functional in E. coli may be employed. Depending on the expression systems, presently preferred secretion signals may include, but are not limited to, those encoded by the following E. coli genes: ompA, ompT, ompF, ompC, beta-lactamase, and alkaline phosphatase, and the like (von Heijne, J. Mol. Biol. 184: 99-105, 1985). In addition, the bacterial pelB gene secretion signal (Lei et al., J. Bacteriol. 169: 4379, 1987), the phoA secretion signal, and the cek2 functional in insect cell may be employed. The most preferred secretion signal for certain expression systems is the E. coli ompA secretion signal. Other prokaryotic and eukaryotic secretion signals known to those of skill in the art may also be employed (see, e.g., von Heijne, J. Mol. Biol. 184: 99-105, 1985). Using the methods described herein, one of skill in the art can substitute secretion signals that are functional in either yeast, insect or mammalian cells to secrete proteins from those cells.

[0429] Preferred plasmids for transformation of E. coli cells include the pET expression vectors (e.g., pET-11a, pET-12a-c, pET-15b; see U.S. Pat. No. 4,952,496; available from Novagen, Madison, Wis.). Other preferred plasmids include the pKK plasmids, particularly pKK 223-3, which contains the tac promoter (Brosius et al., 1984 Proc. Natl. Acad. Sci. 81: 6929; Ausubel et al., Current Protocols in Molecular Biology; U.S. Pat. Nos. 5,122,463, 5,173,403, 5,187,153, 5,204,254, 5,212,058, 5,212,286, 5,215,907, 5,220,013, 5,223,483, and 5,229,279). Plasmid pKK has been modified by replacement of the ampicillin resistance gene with a kanamycin resistance gene. (Available from Pharmacia; obtained from pUC4K, see, e.g., Vieira et al. (1982 Gene 19: 259-268; and U.S. Pat. No. 4,719,179.) Baculovirus vectors, such as pBlueBac (also called pJVETL and derivatives thereof), particularly pBlueBac III (see, e.g., U.S. Pat. Nos. 5,278,050, 5,244,805, 5,243,041, 5,242,687, 5,266,317, 4,745,051, and 5,169,784; available from Invitrogen, San Diego) may also be used for expression of the polypeptides in insect cells. Other plasmids include the pIN-IllompA plasmids (see U.S. Pat. No. 4,575,013; see also Duffaud et al., Meth. Enz. 153: 492-507, 1987), such as pIN-IIIompA2.

[0430] Preferably, if one or more DNA molecules is replicated in bacterial cells, the preferred host is E. coli. The preferred DNA molecule is such a system also includes a bacterial origin of replication, to ensure the maintenance of the DNA molecule from generation to generation of the bacteria. In this way, large quantities of the DNA molecule can be produced by replication in bacteria. In such expression systems, preferred bacterial origins of replication include, but are not limited to, the fl-ori and col E1 origins of replication. Preferred hosts for such systems contain chromosomal copies of DNA encoding T7 RNA polymerase operably linked to an inducible promoter, such as the lacUV promoter (see U.S. Pat. No. 4,952,496). Such hosts include, but are not limited to, lysogens E. coli strains HMS174(DE3)pLysS, BL21(DE3)pLysS, HMS174(DE3) and BL21(DE3). Strain BL21(DE3) is preferred. The pLys strains provide low levels of T7 lysozyme, a natural inhibitor of T7 RNA polymerase.

[0431] The DNA molecules provided may also contain a gene coding for a repressor protein. The repressor protein is capable of repressing the transcription of a promoter that contains sequences of nucleotides to which the repressor protein binds. The promoter can be derepressed by altering the physiological conditions of the cell. For example, the alteration can be accomplished by adding to the growth medium a molecule that inhibits the ability to interact with the operator or with regulatory proteins or other regions of the DNA or by altering the temperature of the growth media. Preferred repressor proteins include, but are not limited to the E. coli lacI repressor responsive to IPTG induction, the temperature sensitive λ cI857 repressor, and the like. The E. Coli lacI repressor is preferred.

[0432] In general, recombinant constructs of the subject invention will also contain elements necessary for transcription and translation. In particular, such elements are preferred where the recombinant expression construct containing nucleic acid sequences encoding binding domain-immunoglobulin fusion proteins is intended for expression in a host cell or organism. In certain embodiments of the present invention, cell type preferred or cell type specific expression of a cell binding domain-immunoglobulin fusion encoding gene may be achieved by placing the gene under regulation of a promoter. The choice of the promoter will depend upon the cell type to be transformed and the degree or type of control desired. Promoters can be constitutive or active and may further be cell type specific, tissue specific, individual cell specific, event specific, temporally specific or inducible. Cell-type specific promoters and event type specific promoters are preferred. Examples of constitutive or nonspecific promoters include the SV40 early promoter (U.S. Pat. No. 5,118,627), the SV40 late promoter (U.S. Pat. No. 5,118,627), CMV early gene promoter (U.S. Pat. No. 5,168,062), and adenovirus promoter. In addition to viral promoters, cellular promoters are also amenable within the context of this invention. In particular, cellular promoters for the so-called housekeeping genes are useful. Viral promoters are preferred, because generally they are stronger promoters than cellular promoters. Promoter regions have been identified in the genes of many eukaryotes including higher eukaryotes, such that suitable promoters for use in a particular host can be readily selected by those skilled in the art.

[0433] Inducible promoters may also be used. These promoters include MMTV LTR (PCT WO 91/13160), inducible by dexamethasone; metallothionein promoter, inducible by heavy metals; and promoters with cAMP response elements, inducible by cAMP. By using an inducible promoter, the nucleic acid sequence encoding a binding domain-immunoglobulin fusion protein may be delivered to a cell by the subject invention expression construct and will remain quiescent until the addition of the inducer. This allows further control on the timing of production of the gene product.

[0434] Event-type specific promoters are active or up-regulated only upon the occurrence of an event, such as tumorigenicity or viral infection. The HIV LTR is a well known example of an event-specific promoter. The promoter is inactive unless the tat gene product is present, which occurs upon viral infection. Some event-type promoters are also tissue-specific.

[0435] Additionally, promoters that are coordinately regulated with a particular cellular gene may be used. For example, promoters of genes that are coordinately expressed may be used when expression of a particular binding construct of the invention, for example, a binding domain-immunoglobulin fusion protein-encoding gene is desired in concert with expression of one or more additional endogenous or exogenously introduced genes. This type of promoter is especially useful when one knows the pattern of gene expression relevant to induction of an immune response in a particular tissue of the immune system, so that specific immunocompetent cells within that tissue may be activated or otherwise recruited to participate in the immune response.

[0436] In addition to the promoter, repressor sequences, negative regulators, or tissue-specific silencers may be inserted to reduce non-specific expression of binding domain-immunoglobulin fusion protein encoding genes in certain situations, such as, for example, a host that is transiently immunocompromised as part of a therapeutic strategy. Multiple repressor elements may be inserted in the promoter region. Repression of transcription is independent on the orientation of repressor elements or distance from the promoter. One type of repressor sequence is an insulator sequence. Such sequences inhibit transcription (Dunaway et al., 1997 Mol Cell Biol 17: 182-9; Gdula et al., 1996 Proc Natl Acad Sci USA 93: 9378-83, Chan et al., 1996 J Virol 70: 5312-28; Scott and Geyer, 1995 EMBO J. 14: 6258-67; Kalos and Fournier, 1995 Mol Cell Biol 15: 198-207; Chung et al., 1993 Cell 74: 505-14) and will silence undesired background transcription.

[0437] Repressor elements have also been identified in the promoter regions of the genes for type II (cartilage) collagen, choline acetyltransferase, albumin (Hu et al., 1992 J Cell Growth Differ. 3(9): 577-588), phosphoglycerate kinase (PGK-2) (Misuno et al., 1992 Gene 119(2): 293-297), and in the 6-phosphofructo-2-kinase/fructose-2, 6-bisphosphatase gene. (Lemaigre et al., Mol. Cell Biol. 11(2): 1099-1106). Furthermore, the negative regulatory element Tse-1 has been identified in a number of liver specific genes, and has been shown to block cAMP response element(CRE)-mediated induction of gene activation in hepatocytes. (Boshart et al., 1990 Cell 61(5): 905-916,).

[0438] In preferred embodiments, elements that increase the expression of the desired product are incorporated into the construct. Such elements include internal ribosome binding sites (IRES; Wang and Siddiqui, 1995 Curr. Top. Microbiol. Immunol 203: 99; Ehrenfeld and Semler, 1995 Curr. Top. Microbiol. Immunol. 203: 65; Rees et al., 1996 Biotechniques 20: 102; Sugimoto et al., 1994 Biotechnology 12: 694). IRES increase translation efficiency. As well, other sequences may enhance expression. For some genes, sequences especially at the 5′ end inhibit transcription and/or translation. These sequences are usually palindromes that can form hairpin structures. Any such sequences in the nucleic acid to be delivered are generally deleted. Expression levels of the transcript or translated product are assayed to confirm or ascertain which sequences affect expression. Transcript levels may be assayed by any known method, including Northern blot hybridization, RNase probe protection and the like. Protein levels may be assayed by any known method, including ELISA, western blot, immunocytochemistry or other well known techniques.

[0439] Other elements may be incorporated into the constructs of the invention, for example, into binding domain-immunoglobulin fusion protein encoding constructs of the present invention. In preferred embodiments, the construct includes a transcription terminator sequence, including a polyadenylation sequence, splice donor and acceptor sites, and an enhancer. Other elements useful for expression and maintenance of the construct in mammalian cells or other eukaryotic cells may also be incorporated (e.g., origin of replication). Because the constructs are conveniently produced in bacterial cells, elements that are necessary for, or that enhance, propagation in bacteria are incorporated. Such elements include an origin of replication, a selectable marker and the like.

[0440] As provided herein, an additional level of controlling the expression of nucleic acids encoding constructs of the invention, for example, binding domain-immunoglobulin fusion proteins, delivered to cells for gene therapy, for example, may be provided by simultaneously delivering two or more differentially regulated nucleic acid constructs. The use of such a multiple nucleic acid construct approach may permit coordinated regulation of an immune response such as, for example, spatiotemporal coordination that depends on the cell type and/or presence of another expressed encoded component. Those familiar with the art will appreciate that multiple levels of regulated gene expression may be achieved in a similar manner by selection of suitable regulatory sequences, including but not limited to promoters, enhancers and other well known gene regulatory elements.

[0441] The present invention also relates to vectors, and to constructs prepared from known vectors that include nucleic acids of the present invention, and in particular to “recombinant expression constructs”, including any of various known constructs, including delivery constructs, useful for gene therapy, that include any nucleic acids encoding, for example, binding domain-immunoglobulin fusion proteins and polypeptides according to the invention as provided herein; to host cells which are genetically engineered with vectors and/or other constructs of the invention and to methods of administering expression or other constructs comprising nucleic acid sequences encoding, for example, binding domain-immunoglobulin fusion polypeptides and fusion proteins of the invention, or fragments or variants thereof, by recombinant techniques.

[0442] Various constructs of the invention, including for example, binding domain-immunoglobulin fusion proteins, can be expressed in virtually any host cell, including in vivo host cells in the case of use for gene therapy, under the control of appropriate promoters, depending on the nature of the construct (e.g., type of promoter, as described above), and on the nature of the desired host cell (e.g., whether postmitotic terminally differentiated or actively dividing; e.g., whether the expression construct occurs in host cell as an episome or is integrated into host cell genome).

[0443] Appropriate cloning and expression vectors for use with prokaryotic and eukaryotic hosts are described, for example, by Sambrook, et al., Molecular Cloning: A Laboratory Manual, Second Edition, Cold Spring Harbor, N.Y., (1989); as noted herein, in particularly preferred embodiments of the invention, recombinant expression is conducted in mammalian cells that have been transfected or transformed with the subject invention recombinant expression construct. See also, for example, Machida, C A., “Viral Vectors for Gene Therapy: Methods and Protocols”; Wolff, J A, “Gene Therapeutics: Methods and Applications of Direct Gene Transfer” (Birkhauser 1994); Stein, U and Walther, W (eds. P, “Gene Therapy of Cancer: Methods and Protocols” (Humana Press 2000); Robbins, PD (ed.), “Gene Therapy Protocols” (Humana Press 1997); Morgan, J R (ed.), “Gene Therapy Protocols” (Humana Press 2002); Meager, A (ed.), “Gene Therapy Technologies, Applications and Regulations: From Laboratory to Clinic” (John Wiley & Sons Inc. 1999); Machida, C A and Constant, J G, “Viral Vectors for Gene Therapy: Methods and Protocols” (Humana Press 2002); “New Methods Of Gene Therapy For Genetic Metabolic Diseases NIH Guide,” Volume 22, Number 35, Oct. 1, 1993. See also recent U.S. patents relating to gene therapy, including vaccines, which include U.S. Pat. No. 6,384,210 (“Solvent for biopolymer synthesis, solvent microdroplets and methods of use”); U.S. Pat. No. 6,384,203 (“Family of immunoregulators designated leukocyte immunoglobulin-like receptors (LIR)”); U.S. Pat. No. 6,384,202 (“Cell-specific active compounds regulated by the cell cycle”); U.S. Pat. No. 6,384,018 (“Polynucleotide tuberculosis vaccine”); U.S. Pat. No. 6,383,814 (“Cationic amphiphiles for intracellular delivery of therapeutic molecules”); U.S. Pat. No. 6,383,811 (“Polyampholytes for delivering polyions to a cell”); U.S. Pat. No. 6,383,795 (“Efficient purification of adenovirus”); U.S. Pat. No. 6,383,794 (“Methods of producing high titer recombinant adeno-associated virus”); U.S. Pat. No. 6,383,785 (“Self-enhancing, pharmacologically controllable expression systems”); U.S. Pat. No. 6,383,753 (“Yeast mammalian regulators of cell proliferation”); U.S. Pat. No. 6,383,746 (“Functional promoter for CCR5”); U.S. Pat. No. 6,383,743 (“Method for serial analysis of gene expression”); U.S. Pat. No. 6,383,738 (“Herpes simplex virus ORF P is a repressor of viral protein synthesis”); U.S. Pat. No. 6,383,737 (“Human oxalyl-CoA Decarboxylase”); U.S. Pat. No. 6,383,733 (“Methods of screening for pharmacologically active compounds for the treatment of tumour diseases”); U.S. Pat. No. 6,383,522 (“Toxicity reduced composition containing an anti-neoplastic agent and a shark cartilage extract”); U.S. Pat. No. 6,383,512 (“Vesicular complexes and methods of making and using the same”); U.S. Pat. No. 6,383,481 (“Method for transplantation of hemopoietic stem cells”); U.S. Pat. No. 6,383,478 (“Polymeric encapsulation system promoting angiogenesis”); U.S. Pat. No. 6,383,138 (“Method for transdermal sampling of analytes”); U.S. Pat. No. 6,380,382 (“Gene encoding a protein having diagnostic, preventive, therapeutic, and other uses”); U.S. Pat. No. 6,380,371 (“Endoglycan: a novel protein having selectin ligand and chemokine presentation activity”); U.S. Pat. No. 6,380,369 (“Human DNA mismatch repair proteins”); U.S. Pat. No. 6,380,362 (“Polynucleotides, polypeptides expressed by the polynucleotides and methods for their use”); U.S. Pat. No. 6,380,170 (“Nucleic acid construct for the cell cycle regulated expression of structural genes”); U.S. Pat. No. 6,380,169 (“Metal complex containing oligonucleoside cleavage compounds and therapies”); U.S. Pat. No. 6,379,967 (“Herpesvirus saimiri as viral vector”); U.S. Pat. No. 6,379,966 (“Intravascular delivery of non-viral nucleic acid protease proteins, and uses thereof”).

[0444] Typically, for example, expression constructs are derived from plasmid vectors. One preferred construct is a modified pNASS vector (Clontech, Palo Alto, Calif.), which has nucleic acid sequences encoding an ampicillin resistance gene, a polyadenylation signal and a T7 promoter site. Other suitable mammalian expression vectors are well known (see, e.g., Ausubel et al., 1995; Sambrook et al., supra; see also, e.g., catalogues from Invitrogen, San Diego, Calif.; Novagen, Madison, Wis.; Pharmacia, Piscataway, N.J.; and others). Presently preferred constructs may be prepared that include a dihydrofolate reductase (DHFR) encoding sequence under suitable regulatory control, for promoting enhanced production levels of the binding domain-immunoglobulin fusion protei, which levels result from gene amplification following application of an appropriate selection agent (e.g., methetrexate).

[0445] Generally, recombinant expression vectors will include origins of replication and selectable markers permitting transformation of the host cell, and a promoter derived from a highly-expressed gene to direct transcription of a downstream structural sequence, as described above. The heterologous structural sequence is assembled in appropriate phase with translation initiation and termination sequences. Thus, for example, the binding domain-immunoglobulin fusion protein encoding nucleic acids as provided herein may be included in any one of a variety of expression vector constructs as a recombinant expression construct for expressing a binding domain-immunoglobulin fusion polypeptide in a host cell. In certain preferred embodiments the constructs are included in formulations that are administered in vivo. Such vectors and constructs include chromosomal, nonchromosomal and synthetic DNA sequences, e.g., derivatives of SV40; bacterial plasmids; phage DNA; yeast plasmids; vectors derived from combinations of plasmids and phage DNA, viral DNA, such as vaccinia, adenovirus, fowl pox virus, and pseudorabies, or replication deficient retroviruses as described below. However, any other vector may be used for preparation of a recombinant expression construct, and in preferred embodiments such a vector will be replicable and viable in the host.

[0446] The appropriate DNA sequence(s) may be inserted into a vector, for example, by a variety of procedures. In general, a DNA sequence is inserted into an appropriate restriction endonuclease site(s) by procedures known in the art. Standard techniques for cloning, DNA isolation, amplification and purification, for enzymatic reactions involving DNA ligase, DNA polymerase, restriction endonucleases and the like, and various separation techniques are those known and commonly employed by those skilled in the art. A number of standard techniques are described, for example, in Ausubel et al. (1993 Current Protocols in Molecular Biology, Greene Publ. Assoc. Inc. & John Wiley & Sons, Inc., Boston, Mass.); Sambrook et al. (1989 Molecular Cloning, Second Ed., Cold Spring Harbor Laboratory, Plainview, N.Y.); Maniatis et al. (1982 Molecular Cloning, Cold Spring Harbor Laboratory, Plainview, N.Y.); Glover (Ed.) (1985 DNA Cloning Vol. I and II, IRL Press, Oxford, UK); Hames and Higgins (Eds.), (1985 Nucleic Acid Hybridization, IRL Press, Oxford, UK); and elsewhere.

[0447] The DNA sequence in the expression vector is operatively linked to at least one appropriate expression control sequence(s) (e.g., a constitutive promoter or a regulated promoter) to direct mRNA synthesis. Representative examples of such expression control sequences include promoters of eukaryotic cells or their viruses, as described above. Promoter regions can be selected from any desired gene using CAT (chloramphenicol transferase) vectors or other vectors with selectable markers. Eukaryotic promoters include CMV immediate early, HSV thymidine kinase, early and late SV40, LTRs from retrovirus, and mouse metallothionein-I. Selection of the appropriate vector and promoter is well within the level of ordinary skill in the art, and preparation of certain particularly preferred recombinant expression constructs comprising at least one promoter or regulated promoter operably linked to a nucleic acid encoding an binding domain-immunoglobulin fusion polypeptide is described herein.

[0448] Transcription of the DNA encoding proteins and polypeptides included within the present invention by higher eukaryotes may be increased by inserting an enhancer sequence into the vector. Enhancers are cis-acting elements of DNA, usually about from 10 to 300 bp that act on a promoter to increase its transcription. Examples including the SV40 enhancer on the late side of the replication origin bp 100 to 270, a cytomegalovirus early promoter enhancer, the polyoma enhancer on the late side of the replication origin, and adenovirus enhancers.

[0449] Gene therapy is the use of genetic material to treat disease. It comprises strategies to replace defective genes or add new genes to cells and/or tissues, and is being developed for application in the treatment of cancer, the correction of metabolic disorders and in the field of immunotherapy. Gene therapies of the invention include the use of various constructs of the invention, with or without a separate carrier or delivery vehicle or constructs, for treatment of the diseases, disorders, and/or conditions noted herein. Such constructs may also be used as vaccines for treatment or prevention of the diseases, disorders, and/or conditions noted herein. DNA vaccines, for example, make use of polynucleotides encoding immunogenic protein and nucleic acid determinants to stimulate the immune system against pathogens or tumor cells. Such strategies can stimulate either acquired or innate immunity or can involve the modification of immune function through cytokine expression. In vivo gene therapy involves the direct injection of genetic material into a patient or animal model of human disease. Vaccines and immune modulation are systemic therapies. With tissue-specific in vivo therapies, such as those that aim to treat cancer, localized gene delivery and/or expression/targeting systems are preferred. Diverse gene therapy vectors have been designed to target specific tissues, and procedures have been developed to physically target specific tissues, for example, using catheter-based technologies, all of which are contemplated herein. Ex vivo approaches to gene therapy are also contemplated herein and involve the removal, genetic modification, expansion and re-administration of a patient's own cells. Examples include bone marrow transplantation for cancer treatment or the genetic modivation of lymphoid progenitor cells. Ex vivo gene therapy is preferably applied to the treatment of cells that are easily accessible and can survive in culture during the gene transfer process (such as blood or skin cells).

[0450] Useful gene therapy vectors include adenoviral vectors, lentiviral vectors, Adeno-associated virus (AAV) vectors, Herpes Simplex Virus (Hsv) vectors, and retroviral vectors. Gene therapies may also be carried out using “¹naked DNA,” lipsome-based delivery, lipid-based delivery (including DNA attached to positively charged lipids), and electroporation.

[0451] As provided herein, in certain embodiments, including but not limited to gene therapy embodiments, the vector may be a viral vector such as, for example, a retroviral vector. Miller et al., 1989 BioTechniques 7: 980; Coffin and Varmus, 1996 Retroviruses, Cold Spring Harbor Laboratory Press, NY. For example, retroviruses from which the retroviral plasmid vectors may be derived include, but are not limited to, Moloney Murine Leukemia Virus, spleen necrosis virus, retroviruses such as Rous Sarcoma Virus, Harvey Sarcoma virus, avian leukosis virus, gibbon ape leukemia virus, human immunodeficiency virus, adenovirus, Myeloproliferative Sarcoma Virus, and mammary tumor virus.

[0452] Retroviruses are RNA viruses which can replicate and integrate into the genome of a host cell via a DNA intermediate. This DNA intermediate, or provirus, may be stably integrated into the host cell DNA. According to certain embodiments of the present invention, an expression construct may comprise a retrovirus into which a foreign gene that encodes a foreign protein is incorporated in place of normal retroviral RNA. When retroviral RNA enters a host cell coincident with infection, the foreign gene is also introduced into the cell, and may then be integrated into host cell DNA as if it were part of the retroviral genome. Expression of this foreign gene within the host results in expression of the foreign protein.

[0453] Most retroviral vector systems which have been developed for gene therapy are based on murine retroviruses. Such retroviruses exist in two forms, as free viral particles referred to as virions, or as proviruses integrated into host cell DNA. The virion form of the virus contains the structural and enzymatic proteins of the retrovirus (including the enzyme reverse transcriptase), two RNA copies of the viral genome, and portions of the source cell plasma membrane containing viral envelope glycoprotein. The retroviral genome is organized into four main regions: the Long Terminal Repeat (LTR), which contains cis-acting elements necessary for the initiation and termination of transcription and is situated both 5′ and 3′ of the coding genes, and the three coding genes gag, pol, and env. These three genes gag, pol, and env encode, respectively, internal viral structures, enzymatic proteins (such as integrase), and the envelope glycoprotein (designated gp70 and p15e) which confers infectivity and host range specificity of the virus, as well as the “R” peptide of undetermined function.

[0454] Separate packaging cell lines and vector producing cell lines have been developed because of safety concerns regarding the uses of retroviruses, including their use in expression constructs as provided by the present invention. Briefly, this methodology employs the use of two components, a retroviral vector and a packaging cell line (PCL). The retroviral vector contains long terminal repeats (LTRs), the foreign DNA to be transferred and a packaging sequence (y). This retroviral vector will not reproduce by itself because the genes which encode structural and envelope proteins are not included within the vector genome. The PCL contains genes encoding the gag, pol, and env proteins, but does not contain the packaging signal “y”. Thus, a PCL can only form empty virion particles by itself. Within this general method, the retroviral vector is introduced into the PCL, thereby creating a vector-producing cell line (VCL). This VCL manufactures virion particles containing only the retroviral vector's (foreign) genome, and therefore has previously been considered to be a safe retrovirus vector for therapeutic use.

[0455] “Retroviral vector construct” refers to an assembly which is, within preferred embodiments of the invention, capable of directing the expression of a sequence(s) or gene(s) of interest, such as binding domain-immunoglobulin fusion encoding nucleic acid sequences. Briefly, the retroviral vector construct must include a 5′ LTR, a tRNA binding site, a packaging signal, an origin of second strand DNA synthesis and a 3′ LTR. A wide variety of heterologous sequences may be included within the vector construct, including for example, sequences which encode a protein (e.g., cytotoxic protein, disease-associated antigen, immune accessory molecule, or replacement gene), or which are useful as a molecule itself (e.g., as a ribozyme or antisense sequence).

[0456] Retroviral vector constructs of the present invention may be readily constructed from a wide variety of retroviruses, including for example, B, C, and D type retroviruses as well as spumaviruses and lentiviruses (see, e.g., RNA Tumor Viruses, Second Edition, Cold Spring Harbor Laboratory, 1985). Such retroviruses may be readily obtained from depositories or collections such as the American Type Culture Collection (“ATCC”; Rockville, Md.), or isolated from known sources using commonly available techniques. Any of the above retroviruses may be readily utilized in order to assemble or construct retroviral vector constructs, packaging cells, or producer cells of the present invention given the disclosure provided herein, and standard recombinant techniques (e.g., Sambrook et al, Molecular Cloning: A Laboratory Manual, 2d ed., Cold Spring Harbor Laboratory Press, 1989; Kunkle, 1985 PNAS 82: 488).

[0457] Suitable promoters for use in viral vectors generally may include, but are not limited to, the retroviral LTR; the SV40 promoter; and the human cytomegalovirus (CMV) promoter described in Miller, et al., 1989 Biotechniques 7: 980-990, or any other promoter (e.g., cellular promoters such as eukaryotic cellular promoters including, but not limited to, the histone, pol III, and P-actin promoters). Other viral promoters which may be employed include, but are not limited to, adenovirus promoters, thymidine kinase (TK) promoters, and B19 parvovirus promoters. The selection of a suitable promoter will be apparent to those skilled in the art from the teachings contained herein, and may be from among either regulated promoters or promoters as described above.

[0458] As described above, the retroviral plasmid vector is employed to transduce packaging cell lines to form producer cell lines. Examples of packaging cells which may be transfected include, but are not limited to, the PE501, PA317, ψ-2, ψ-AM, PA12, T19-14×, VT-19-17-H2, ψCRE, ψCRIP, GP+E-86, GP+envAm12, and DAN cell lines as described in Miller, Human Gene Therapy, 1: 5-14 (1990). The vector may transduce the packaging cells through any means known in the art. Such means include, but are not limited to, electroporation, the use of liposomes, and CaPO₄ precipitation. In one alternative, the retroviral plasmid vector may be encapsulated into a liposome, or coupled to a lipid, and then administered to a host.

[0459] The producer cell line generates infectious retroviral vector particles which include the nucleic acid sequence(s) encoding the binding domain-immunoglobulin fusion polypeptides or fusion proteins. Such retroviral vector particles then may be employed, to transduce eukaryotic cells, either in vitro or in vivo. The transduced eukaryotic cells will express the nucleic acid sequence(s) encoding the binding domain-immunoglobulin fusion polypeptide or fusion protein. Eukaryotic cells which may be transduced include, but are not limited to, embryonic stem cells, as well as hematopoietic stem cells, hepatocytes, fibroblasts, circulating peripheral blood mononuclear and polymorphonuclear cells including myelomonocytic cells, lymphocytes, myoblasts, tissue macrophages, dendritic cells, Kupffer cells, lymphoid and reticuloendothelia cells of the lymph nodes and spleen, keratinocytes, endothelial cells, and bronchial epithelial cells.

[0460] As another example of an embodiment of the invention in which a viral vector is used to prepare, for example, a recombinant binding domain-immunoglobulin fusion expression construct, in one preferred embodiment, host cells transduced by a recombinant viral construct directing the expression of binding domain-immunoglobulin fusion polypeptides or fusion proteins may produce viral particles containing expressed binding domain-immunoglobulin fusion polypeptides or fusion proteins that are derived from portions of a host cell membrane incorporated by the viral particles during viral budding.

[0461] In another aspect, the present invention relates to host cells containing the herein described nucleic acid constructs, such as, for example, recombinant binding domain-immunoglobulin fusion expression constructs. Host cells are genetically engineered (transduced, transformed or transfected) with the vectors and/or expression constructs of this invention which may be, for example, a cloning vector, a shuttle vector, or an expression construct. The vector or construct may be, for example, in the form of a plasmid, a viral particle, a phage, etc. The engineered host cells can be cultured in conventional nutrient media modified as appropriate for activating promoters, selecting transformants or amplifying particular genes such as genes encoding binding domain-immunoglobulin fusion polypeptides or binding domain-immunoglobulin fusion fusion proteins. The culture conditions for particular host cells selected for expression, such as temperature, pH and the like, will be readily apparent to the ordinarily skilled artisan.

[0462] The host cell for production or expression of a construct of the invention, for example, can be a higher eukaryotic cell, such as a mammalian cell, or a lower eukaryotic cell, such as a yeast cell, or the host cell can be a prokaryotic cell, such as a bacterial cell. Representative examples of appropriate host cells according to the present invention include, but need not be limited to, bacterial cells, such as E. coli, Streptomyces, Salmonella tvphimurium; fungal cells, such as yeast; insect cells, such as Drosophila S2 and Spodoptera Sf9; animal cells, such as CHO, COS or 293 cells; adenoviruses; plant cells, or any suitable cell already adapted to in vitro propagation or so established de novo. The selection of an appropriate host is deemed to be within the scope of those skilled in the art from the teachings herein.

[0463] Various mammalian cell culture systems can also be employed to express recombinant protein. Examples of mammalian expression systems include the CQS-7 lines of monkey kidney fibroblasts, described by Gluzman, 1981 Cell 23: 175, and other cell lines capable of expressing a compatible vector, for example, the C127, 3T3, CHO, HeLa and BHK cell lines. Mammalian expression vectors will comprise an origin of replication, a suitable promoter and enhancer, and also any necessary ribosome binding sites, polyadenylation site, splice donor and acceptor sites, transcriptional termination sequences, and 5′ flanking nontranscribed sequences, for example as described herein regarding the preparation of binding domain-immunoglobulin fusion expression constructs. DNA sequences derived from the SV40 splice, and polyadenylation sites may be used to provide the required nontranscribed genetic elements. Introduction of the construct into the host cell can be effected by a variety of methods with which those skilled in the art will be familiar, including but not limited to, for example, calcium phosphate transfection, DEAE-Dextran mediated transfection, or electroporation (Davis et al., 1986 Basic Methods in Molecular Biology).

[0464] The present invention constructs, for example, binding domain-immunoglobulin fusion proteins, or compositions comprising one or more polynucleotides encoding same as described herein (for example, to be administered under conditions and for a time sufficient to permit expression of a binding domain-immunoglobulin fusion protein in a host cell in vivo or in vitro, for gene therapy, for example, among other things), may be formulated into pharmaceutical compositions for administration according to well known methodologies. Pharmaceutical compositions generally comprise one or more recombinant expression constructs, and/or expression products of such constructs, in combination with a pharmaceutically acceptable carrier, excipient or diluent. Such carriers will be nontoxic to recipients at the dosages and concentrations employed. For nucleic acid-based formulations, or for formulations comprising expression products of the subject invention recombinant constructs, about 0.01 ag/kg to about 100 mg/kg body weight will be adminstered, for example, typically by the intradermal, subcutaneous, intramuscular or intravenous route, or by other routes. A preferred dosage, for example, is about 1 μg/kg to about 1 mg/kg, with about 5 μg/kg to about 200 μg/kg particularly preferred. It will be evident to those skilled in the art that the number and frequency of administration will be dependent upon the response of the host. “Pharmaceutically acceptable carriers” for therapeutic use are well known in the pharmaceutical art, and are described, for example, in Remingtons Pharmaceutical Sciences, Mack Publishing Co. (A. R. Gennaro edit. 1985). For example, sterile saline and phosphate-buffered saline at physiological pH may be used. Preservatives, stabilizers, dyes and even flavoring agents may be provided in the pharmaceutical composition. For example, sodium benzoate, sorbic acid and esters of p-hydroxybenzoic acid may be added as preservatives. Id. at 1449. In addition, antioxidants and suspending agents may be used. Id.

[0465] “Pharmaceutically acceptable salt” refers to salts of the compounds of the present invention derived from the combination of such compounds and an organic or inorganic acid (acid addition salts) or an organic or inorganic base (base addition salts). The compounds of the present invention may be used in either the free base or salt forms, with both forms being considered as being within the scope of the present invention.

[0466] The pharmaceutical compositions that contain one or more nucleic acid constructs of the invention, for example, binding domain-immunoglobulin fusion protein encoding constructs (or their expressed products) may be in any form which allows for the composition to be administered to a patient. For example, the composition may be in the form of a solid, liquid or gas (aerosol). Typical routes of administration include, without limitation, oral, topical, parenteral (e.g., sublingually or buccally), sublingual, rectal, vaginal, and intranasal. The term parenteral as used herein includes subcutaneous injections, intravenous, intramuscular, intrasternal, intracavernous, intrathecal, intrameatal, intraurethral injection or infusion techniques. The pharmaceutical composition is formulated so as to allow the active ingredients contained therein to be bioavailable upon administration of the composition to a patient. Compositions that will be administered to a patient take the form of one or more dosage units, where for example, a tablet may be a single dosage unit, and a container of one or more compounds of the invention in aerosol form may hold a plurality of dosage units.

[0467] For oral administration, an excipient and/or binder may be present. Examples are sucrose, kaolin, glycerin, starch dextrins, sodium alginate, carboxymethylcellulose and ethyl cellulose. Coloring and/or flavoring agents may be present. A coating shell may be employed.

[0468] The composition may be in the form of a liquid, e.g., an elixir, syrup, solution, emulsion or suspension. The liquid may be for oral administration or for delivery by injection, as two examples. When intended for oral administration, preferred compositions contain, in addition to one or more binding domain-immunoglobulin fusion construct or expressed product, one or more of a sweetening agent, preservatives, dye/colorant and flavor enhancer. In a composition intended to be administered by injection, one or more of a surfactant, preservative, wetting agent, dispersing agent, suspending agent, buffer, stabilizer and isotonic agent may be included.

[0469] A liquid pharmaceutical composition as used herein, whether in the form of a solution, suspension or other like form, may include one or more of the following adjuvants: sterile diluents such as water for injection, saline solution, preferably physiological saline, Ringer's solution, isotonic sodium chloride, fixed oils such as synthetic mono or digylcerides which may serve as the solvent or suspending medium, polyethylene glycols, glycerin, propylene glycol or other solvents; antibacterial agents such as benzyl alcohol or methyl paraben; antioxidants such as ascorbic acid or sodium bisulfite; chelating agents such as ethylenediaminetetraacetic acid; buffers such as acetates, citrates or phosphates and agents for the adjustment of tonicity such as sodium chloride or dextrose. The parenteral preparation can be enclosed in ampoules, disposable syringes or multiple dose vials made of glass or plastic. Physiological saline is a preferred adjuvant. An injectable pharmaceutical composition is preferably sterile.

[0470] It may also be desirable to include other components in the preparation, such as delivery vehicles including but not limited to aluminum salts, water-in-oil emulsions, biodegradable oil vehicles, oil-in-water emulsions, biodegradable microcapsules, and liposomes. Examples of immunostimulatory substances (adjuvants) for use in such vehicles include N-acetylmuramyl-L-alanine-D-isoglutamine (MDP), lipopoly-saccharides (LPS), glucan, IL-12, GM-CSF, gamma interferon and IL-15.

[0471] While any suitable carrier known to those of ordinary skill in the art may be employed in the pharmaceutical compositions of this invention, the type of carrier will vary depending on the mode of administration and whether a sustained release is desired. For parenteral administration, such as subcutaneous injection, the carrier preferably comprises water, saline, alcohol, a fat, a wax or a buffer. For oral administration, any of the above carriers or a solid carrier, such as mannitol, lactose, starch, magnesium stearate, sodium saccharine, talcum, cellulose, glucose, sucrose, and magnesium carbonate, may be employed. Biodegradable microspheres (e.g., polylactic galactide) may also be employed as carriers for the pharmaceutical compositions of this invention. Suitable biodegradable microspheres are disclosed, for example, in U.S. Pat. Nos. 4,897,268 and 5,075,109. In this regard, it is preferable that the microsphere be larger than approximately 25 microns.

[0472] Pharmaceutical compositions may also contain diluents such as buffers, antioxidants such as ascorbic acid, low molecular weight (less than about 10 residues) polypeptides, proteins, amino acids, carbohydrates including glucose, sucrose or dextrins, chelating agents such as EDTA, glutathione and other stabilizers and excipients. Neutral buffered saline or saline mixed with nonspecific serum albumin are exemplary appropriate diluents. Preferably, product is formulated as a lyophilizate using appropriate excipient solutions (e.g., sucrose) as diluents.

[0473] As described above, the subject invention includes compositions capable of delivering nucleic acid molecules encoding binding domain-immunoglobulin fusion proteins. Such compositions include recombinant viral vectors (e.g., retroviruses (see WO 90/07936, WO 91/02805, WO 93/25234, WO 93/25698, and WO 94/03622), adenovirus (see Berkner, 1988 Biotechniques 6: 616-627; L1 et al., 1993 Hum. Gene Ther. 4: 403-409; Vincent et al., Nat. Genet. 5: 130-134; and Kolls et al., 1994 Proc. Natl. Acad. Sci. USA 91: 215-219), pox virus (see U.S. Pat. No. 4,769,330; U.S. Pat. No. 5,017,487; and WO 89/01973)), recombinant expression construct nucleic acid molecules complexed to a polycationic molecule (see WO 93/03709), and nucleic acids associated with liposomes (see Wang et al., 1987 Proc. Natl. Acad. Sci. USA 84: 7851). In certain embodiments, the DNA may be linked to killed or inactivated adenovirus (see Curiel et al., 1992 Hum. Gene Ther. 3: 147-154; Cotton et al., 1992 Proc. Natl. Acad. Sci. USA 89: 6094). Other suitable compositions include DNA-ligand (see Wu et al., 1989 J. Biol. Chem. 264: 16985-16987) and lipid-DNA combinations (see Feigner et al., 1989 Proc. Natl. Acad. Sci. USA 84: 7413-7417).

[0474] In addition to direct in vivo procedures, ex vivo procedures may be used in which cells are removed from a host, modified, and placed into the same or another host animal. It will be evident that one can utilize any of the compositions noted above for introduction of constructs of the invention, for example, binding domain-immunoglobulin fusion proteins or of binding domain-immunoglobulin fusion protein encoding nucleic acid molecules into tissue cells in an ex vivo context. Protocols for viral, physical and chemical methods of uptake are well known in the art.

[0475] Accordingly, the present invention is useful for treating a patient having a B cell disorder or a malignant condition, or for treating a cell culture derived from such a patient. As used herein, the term “patient” refers to any warm-blooded animal, preferably a human. A patient may be afflicted with cancer or a malignant condition, such as B cell lymphoma, or may be normal (i.e., free of detectable disease and infection). A “cell culture” includes any preparation amenable to ex vivo treatment, for example a preparation containing immunocompetent cells or isolated cells of the immune system (including, but not limited to, T cells, macrophages, monocytes, B cells and dendritic cells). Such cells may be isolated by any of a variety of techniques well known to those of ordinary skill in the art (e.g., Ficoll-hypaque density centrifugation). The cells may (but need not) have been isolated from a patient afflicted with a B cell disorder or a malignant condition, and may be reintroduced into a patient after treatment.

[0476] A liquid composition intended for either parenteral or oral administration should contain an amount of a construct of the invention, for example, a binding domain-immunoglobulin fusion protein encoding construct or expressed product, such that a suitable dosage will be obtained. Typically, this amount is at least 0.01 wt % of a binding domain-immunoglobulin fusion construct or expressed product in the composition. When intended for oral administration, this amount may be varied to be between 0.1 and about 70% of the weight of the composition. Preferred oral compositions contain between about 4% and about 50% of binding domain-immunoglobulin fusion construct or expressed product(s). Preferred compositions and preparations are prepared so that, for example, a parenteral dosage unit contains between 0.01 to 1% by weight of active compound.

[0477] The pharmaceutical composition may be intended for topical administration, in which case the carrier may suitably comprise a solution, emulsion, ointment or gel base. The base, for example, may comprise one or more of the following: petrolatum, lanolin, polyethylene glycols, beeswax, mineral oil, diluents such as water and alcohol, and emulsifiers and stabilizers. Thickening agents may be present in a pharmaceutical composition for topical administration. If intended for transdermal administration, the composition may include a transdermal patch or iontophoresis device. Topical formulations may contain a concentration of a construct of the invention, for example, a binding domain-immunoglobulin fusion construct or expressed product, of from about 0.1 to about 10% w/v (weight per unit volume).

[0478] The composition may be intended for rectal administration, in the form, e.g., of a suppository which will melt in the rectum and release the drug. The composition for rectal administration may contain an oleaginous base as a suitable nonirritating excipient. Such bases include, without limitation, lanolin, cocoa butter and polyethylene glycol.

[0479] In the methods of the invention, a construct of the invention, for example, a binding domain-immunoglobulin fusion encoding constructs or expressed product(s), may be administered through use of insert(s), bead(s), timed-release formulation(s), patch(es) or fast-release formulation(s).

[0480] Constructs of the invention, for example, antigen-binding constructs of the invention, may be administered or co-administered to an animal or patient in combination with, or at the same or about the same time, as other compounds. In one aspect, one or more constructs, including for example one or more antigen-binding constructs, are administered to an animal or patient in conjunction with one or more chemotheraputic compounds such as alkylating agents, nucleoside analogues, and the like. The administration or co-administration of one or more constructs, including one or more antigen-binding constructs, of the invention and one or more chemotheraputic agents can be used for the treatment of tumors or cancer in an animal or patient. Exemplary cancers include, but are not limited to, head and neck cancer, breast cancer, colorectal cancer, gastric cancer, hepatic cancer, bladder cancer, cervical cancer, endometrial cancer, lung cancer (non-small cell), ovarian cancer, pancreatic cancer, prostate cancer; choriocarcinoma (lung cancer); hairy cell leukemia, chronic lymphotic leukemia, acute lymphocytic leukemia (breast & bladder), acute myelogenous leukemia, meningeal leukemia, chronic myelogenous leukemia, erythroleukemia. More commonly the cancers treated include non-Hodgkin's lymphoma (osteogenic sarcoma, adult soft tissue sarcoma), T-cell lymphoma, chronic lymphocytic leukaemia, slowly growing non-Hodgkin's lymphomas, Hodgkin's lymphoma and ovarian cancer.

[0481] Examples of an alkylating agents that can be co-administered with one or more constructs, including one or more antigen-binding constructs, of the invention include mechlorethamine, chlorambucil, ifosfamide, melphalan, busulfan, carmustine, lomustine, procarbazine, dacardazine, cisplatin, carboplatin, mitomycin C, cyclophosphamide, isosfamide, hexamethylmelamine, thiotepa, and dacarbazine, and analogues thereof. See for example U.S. Pat. No. 3,046,301 describing the synthesis of chlorambucil, U.S. Pat. No. 3,732,340 describing the synthesis of ifosfamide, U.S. Pat. No. 3,018,302 for the synthesis of cyclophosphamide, U.S. Pat. No. 3,032,584 describing the synthesis of melphalan, and Braunwald et al., “Harrison's Principles of Internal Medicine,” 15th Ed., McGraw-Hill, New York, N.Y., pp. 536-544 (2001) for clinical aspects of cyclophosphamide, chlorambucil, melphalan, ifosfamide, procarbazine, hexamethylmelamine, cisplatin, and carboplatin. Examples of nucleoside analogues, include, but are not limited to, fludarabine pentostatin, methotrexate, fluorouracil, fluorodeoxyuridine, CB3717, azacitidine, cytarabine, floxuridine, mercaptopurine, 6-thioguanine, cladribine and analogues thereof. One example is the combination of constructs, including antigen-binding constructs, that bind CD20. This construct acts as a chemosensitising agent and works together with chemotherapeutic agents, such that less chemotherapeutic agents are necessary to achieve anti-tumor or anti-cancer effects. For example, U.S. Pat. No. 3,923,785 describing the synthesis of pentostatin, U.S. Pat. No. 4,080,325 describing the synthesis of methotrexate, U.S. Pat. No. 2,802,005 describing the synthesis of fluorouracil, and Braunwald et al., “Harrison's Principles of Internal Medicine,” 15th Ed., McGraw-Hill, New York, N.Y., pp. 536-544 (2001) for clinical aspects of methotrexate, 5-fluorouracil, cytosine arabinoside, 6-mercaptopurine, 6-thioguanine, and fludarabine phosphate.

[0482] In another aspect, one or more constructs, including one or more antigen-binding constructs, of the invention can be administered or co-administered compounds that inhibit topoisomerase II or compounds that otherwise interact with nucleic acids in cells. Such compounds include, for example, doxorubicin, epirubicin, etoposide, teniposide, mitoxantrone, and analogues thereof. In one example, this combination is used in treatment to reduce tumor cell contamination of peripheral blood progenitor cells (PBSC) in conjunction with high-dose chemotherapy and autologous stem cell support (HDC-ASCT). See U.S. Pat. No. 6,586,428 to Geroni et al.

[0483] In anther aspect, one or more constructs, including one or more antigen-binding constructs, of the invention can be administered or co-adminstered with therapeutic drugs. For example, Virulizin (Lorus Therapeutics), which is believed to stimulate the release of tumour necrosis factor, TNF-alpha, by tumour cells in vitro and stilumalate activiation of macrophage cells. This can be used in combination with one or more constructs, including one ore more antigen-binding constructs, of the invention to increase cancer cell apoptosis and treat various types of cancers including Pancreatic Cancer, Malignant Melanoma, Kaposi's Sarcoma (KS), Lung Cancer, Breast Cancer, Uterine, Ovarian and Cervical Cancer. Another example is CpG 7909 (Coley Pharmaceutical Group), which is believed to activate NK cells and monocytes and enhance ADCC. This drug can be used in combination with cancer or tumor specific constructs, including antigen-binding constructs, of the invention, such as an anti-CD20 construct, to treat non-Hodgkin's lymphoma and other cancers.

[0484] One or more constructs, including one or more antigen-binding constructs, of the invention can also be combined with angiogensis inhibitors to increase anti-tumor effects. Angiogenisis is the growth of new blood vessels. This process allows tumors to grow and metastasize. Inhibiting angiogeneisis can help prevent metastasis, and stop the spread of tumors cells. Angiogenisis inhibitors include, but are not limited to, angiostatin, endostatin, thrombospondin, platelet factor 4, Cartilage-derived inhibitor (CDI), retinoids, Interleukin-12, tissue inhibitor of metalloproteinase 1, 2 and 3 (TIMP-1, TIMP-2, and TIMP-3) and proteins that block the angiogensis signaling cascade, such as anti-VEGF (Vascular Endothelial Growth Factor) and IFN-alpha. Angiogenesis inhibitors can be administered or co-administered with tumor specific constructs, including antigen-binding constructs capable of mediating, for example, ADCC and/or complement fixation or chemotherapy-conjugated antigen-binding of the invention to combat various types of cancers, for example, solid tumor cancers such as lung and breast cancer.

[0485] In another aspect, one or more constructs, including one or more antigen-binding constructs, of the invention can be administered or co-administered with disease modifying anti-rheumatic agents (DMAR agents) for the treatment of rheumatoid arthritis, psoriasis, ulcerative colitus, systemic lupus erythematosus (SLE), Crohn's disease, ankylosing spondylitis, and various inflammatory disease processes. In such treatment, the constructs, for example, antigen-binding constructs, of the invention are commonly administered in conjunction with compounds such as azathioprine, cyclosporin, gold, hydroxychloroquine, methotrexate, penicallamine, sulphasalazine, and the like.

[0486] In another aspect, one or more constructs, including one or more antigen-binding constructs, of the invention can be administered or co-administered with agents or compounds that counteract the biological effects of interleukin-1, including for example interleukin-1 inhibitors and interleukin-1 receptor antagonist. It is thought that interleukin-1 has a role in the generation of rheumatoid arthritis (RA), inflammation, and the destruction of joints. IL-1 inhibitors can also be used in conjunction with the constructs, including antigen-binding constructs, of the invention to treat arthritis, inflammatory bowel disease, sepsis and septic shock, ischemic injury, reperfusion, ischemic brain injury such as cerebral palsy and multiple sclerosis. See U.S. Pat. No. 6,159,460 to Thompson et al. In another aspect, for example, one or more constructs, including one or more antigen-binding constructs, of the invention can be administered or co-administered to an animal or patient in conjunction with one or more glucocorticoids for example, methylprednisilone, dexamethasone, hydrocortisone, and the like. Glucocorticoids have been used to induce apoptosis and inhibit growth, independent of ADCC and CDC. These compounds can be combined with constructs, including antigen-binding constructs, of the invention capable of inducing apoptosis in cancer cells. In one example is the anti-CD20, and anti-CD40 antigen-binding constructs, which can be used to induce apoptosis in B-cells, are combined with glutcocorticoids to treat B-cell non-Hodgkin's lymphoma (NHL).

[0487] In another aspect, one or more constructs, including one or more antigen-binding constructs, of the invention can be administered or co-administered with p38 inhibitors or antagonists. The p38 mitogen-activated protein kinase pathway is involved in a number of cellular processes instrumental to the development of rheumatoid arthritis. For example, the activation and infiltration of leukocytes as well as the production of inflammatory cytokines are p38-dependent processes.

[0488] In another aspect, one or more constructs, including one or more antigen-binding constructs, of the invention are administered or co-administered with compounds that promote the differentiation and proliferation of B-cells. Cytokines such as interleukin-4 (IL-4) and interleukin-6 (IL-6), in additional to other biological activities, have been shown to stimulate antibody synthesis and secretion by activated B lympocytes. In a particular aspect of the invention, constructs, including antigen-binding constructs, that recognize and bind CD20 are co-administered with one or more of interleukin-4 (IL-4) and interleukin-6 (IL-6).

[0489] In another aspect one or more constructs, including one or more antigen-binding constructs, of the invention can be administered or co-administered with Interleukin-2 (IL-2). Interleukin 2 (IL-2) is a lymphokine that increases production of effector cells, such as CD4+ T-helper cells, CD8 cytotoxic cells, antibody producing B cells, natural killer cells (NK), and monocytes/macrophages. IL-2 helps produce T-cells, which in turn secrete more of the IL-2 (an “autocrine loop”). IL-2 can be used to augment antibody-dependent cell-mediated cytotoxicity (ADCC) and immunotherapies associated with constructs of the invention. In one example, an anti-CD20 construct of the invention and IL-2 are used to treat patients with relapsed or refractory follicular non-Hodgkin's lymphoma. In another example IL-2 is administered or co-administered with HIV immunotherapies to help with T cell recovery.

[0490] In another aspect one or more constructs, including one or more antigen-binding constructs, of the invention can be administered or co-administered with Interleukin-12 (IL-12). IL-12 is know to enhance cytolytic T-cell responses, promote the development of helper T cells, enhance the activity of natural killer (NK) cells, and induces the secretion of IFN-γ in T and NK cells. IL-12 also increases many helper and effector cells that mediate apoptosis. In another aspect of the invention, one or more constructs, including one or more antigen-binding constructs, are administered or co-administered with IL-12 in the treatment of an animal or patient with a tumor or cancer. For example, a construct, including an antigen-binding construct, of the invention that binds CD20 combined with IL-2 for the treatment of a patient with B-cell non-Hodgkin's lymphoma (NHL).

[0491] One or more constructs, including one or more antigen-binding constructs, of the invention can also be combined with immunomodulators to boost the efficacy of the antigen-binding constructs of the invention. Immunomodulators include, but are not limited to, Colony Stimulating Factors (CSF), Tumor necrosis Factors (TNF), and Interferons (IFN).

[0492] CSFs can include granulocyte-macrophage CSF (GM-CSF), granulocyte-CSF (G-CSF), and macrophage CSF (M-CSF). GM-CSF is thought to regulates the development of neutrophils, macrophages, monocytes and eosinophils. G-CSF has been shown to induce neutrophil production, and M-CSF production. M-CSF has been shown to stimulate macrophages and monocytes. The use of CSFs to treat neutropenia in cancer patients has been long established. In one example, constructs, including antigen-binding constructs, of the invention can be combined with GM-CSF, G-CSF or combinations thereof in order to accelerate recovery from neutropenia in patients after bone marrow trans-plantation and chemotherapy. Neutrophils play a major role in fighting microbes such as bacterial, fungi and parasites. Patients with neutropenia are particularly susceptible to bacterial and wide spread fungal infections. In another example, a construct, including an antigen binding construct, of the invention can be combined with GM-CSF-treated neutrophils, monocytes and macrophages to increase activity against bacteria, fungi, etc, including the dreaded Pneumocystis carinii.

[0493] An example of an IFN is interferon alpha (IFN-α). IFN-α is made naturally by some types of white blood cell as part of the immune response when the body reacts to cancers or viral infections. It has two main modes of attack, interfering with growth and proliferation of cancer cells and it boosting the production of killer T cells and other cells that attack cancer cells. Interferon is also thought to facilitate cancer cells to put out chemical signals that make them better targets for the immune system, and has been used in recent years for several different types of cancer, particularly kidney cancer, melanoma, multiple myeloma, and some types of leukemia. It is also used to treat viral infections such as hepatitis. Interferon-alpha2a, for example, enhances ADCC and can be combined with one or more constructs, including antigen-binding constructs, of the invention to increase the efficiency of ADCC activity associated with the construct. In another example, one or more constructs, including one or more antigen-binding constructs of the invention are administered or co-administered to an animal or patient with interferon-gamma (IFN-γ), which has been show to increase the number of anti-CD20 antigens on B cells and bone marrow plasma cells (BMPC). This is particularly useful for the treatment of patients with multiple myelomas, which have a reduced expression of CD20 in their B cells and bone marrow plasma cells (BMPC). Accordingly, the treatment of multiple myeloma patients with constructs, including antigen-binding constructs of the invention, in particular constructs that bind CD20, may be usefully co-administered in conjunction with IFN-γ.

[0494] TNF is a class of natural chemicals with anticancer properties. One example of a TNF is TNF-alpha. TNF-alpha has also been shown to have synergistic effects with IFN-gamma and IL-12. In another example, TNF can be administered or co-administered with one or more tumor specific constructs, including one or more antigen-binding constructs, of the invention, and include chemotherapy-conjugated antigen binding constructs of the invention, together with IFN-gamma, IL-12 or various combinations thereof. TNF is also known to be an inflammatory regulation molecule. TNF-alpha antibodies or antagonist(s) can be combined with anti-T cell constructs, including antigen-binding constructs, of the invention to treat patients with rheumatoid arthritis, psoriasis, ulcerative colitus, systemic lupus erythematosus (SLE), Crohn's disease, ankylosing spondylitis, and various inflammatory disease processes.

[0495] In another aspect, one or more constructs, including one or more antigen-binding constructs, of the invention can be administered or co-administered with another antibody or antigen-binding construct of the invention. One example is a construct, for example, an antigen-binding construct of the invention capable of binding CD20 combined with a construct capable of binding CD22, CD19 or combinations thereof. This combination is effective as a treatment for indolent and aggressive forms of B-cell lymphomas, and acute and chronic forms of lymphatic leukemias. See U.S. Pat. No. 6,306,393 to Goldberg. In another example, constructs, including antigen-binding constructs, of the invention are co-administered with other constructs such as antigen-binding constructs of the invention that aid in mediating apoptosis. For example, a combination of one or more constructs, including one or more antigen-binding constructs of the invention capable of binding CD28, CD3, CD20 or a combination thereof. The combination of anti-CD28 and CD3 provides a method for prolonged proliferation of T-cells. See U.S. Pat. No. 6,352,694 to June et al. This prolonged T-cell proliferation increases the efficiency immune dependent cytotoxicity, particularly those associated with anti-CD20.

[0496] In another aspect, constructs, including antigen-binding constructs, of the invention can be administered or co-administered with one or more T-cell regulatory molecules. One example is a combination with interleukin-12 (IL-12). The IL-12 cytokine stimulates cell-mediated immunity, has angiostatic activity, and possesses significant anti-tumor effects in a variety of tumor models. IL-12 has also been shown to stimulate the production of interferon-gamma (IFN-γ). Accordingly, the treatment of multiple myeloma patients with one or more constructs, including one or more antigen-binding constructs, of the invention, in particular those that bind CD20, is expected to be more efficacious when co-administered in conjunction with IL-12. In another example, one or more constructs, including one or more antigen-binding constructs, of the invention can be administered or co-administered with a binding-domain construct of the invention other protein capable of binding CTLA-4 to enhance the anti-tumor immune response, by inhibiting the downregulation of T-cell activation.

[0497] In another aspect, one or more constructs, including one or more antigen-binding constructs, of the invention can be combined with gene therapies. In one example, a chemotherapy-conjugated construct of the invention is administered or co-administered with the Bcl-2 antisense oligonucleotide. Bcl-2 is associated with tumor resistance to anti-cancer therapies, and its believed to blocking chemotherapy-induced cell death. In another example one or more constructs, including one or more antigen-binding constructs, of the invention is administered or co-administered with an adenovirus for delivery of a “suicide gene.” The adenovirus inserts the gene directly into the tumor cells, which makes these cells sensitive to an otherwise ineffective drug. Drug treatment then destroys the tumor cells, while leaving healthy cells untouched. However, once therapy is complete stray cancer cells that escaped therapy can reestablish and metastasize. Combining gene therapy with one or more constructs, including one or more antigen-binding constructs, will help kill stray cancer cells and minimize cancer reoccurrence.

[0498] A similar combination can be used with palliative (non-radical) operations to surgically remove tumors. In this example one or more constructs, including one or more antigen-binding constructs, of the invention can be administered before and after surgical extractions of tumors in order to increase the immune response and reduce the likelihood of reoccurrence by killing any cancer cells that were not removed during the surgery.

[0499] Another aspect combines a cancer or antigen vaccine and T-cell regulator molecules. For example, the binding portion, for example, an antigen-binding portion, of a construct can be specific for a cancer cell or antigen, or a protein fragment from a cancer cell or antigen. This can help mediate an immune response against a particular tumor or antigen. Such constructs can be combined with T-cell regulators to increase the efficiency of the immune response.

[0500] In another example, one or more constructs, including one or more antigen-binding constructs, of the invention is administered or co-administered with retinoids. Retinoids include Vitamin A and its derivatives, which have the ability to stop cells from dividing and cause them to differentiate. Vitamin A is combined with an anti-cancer construct(s), including antigen-binding construct(s), of the invention to combat various forms of cancer.

[0501] The terms “binding construct” and “antigen-binding construct” as used herein may refer to, for example, engineered polypeptides, recombinant polypeptides, synthetic, semi-synthetic or other fusion proteins that are capable of binding a target, for example, an antigen. Antigen-binding constructs of the invention may be used in various applications, including those within the variety of uses to which antibodies or related immunoglobulin-type constructs may be put. Constructs, including antigen-binding constructs of the invention can be used in in vivo and in vitro experiments for therapeutic, diagnostic, research, and other purposes. Such uses include, for example, the following.

[0502] Constructs, including antigen-binding constructs of the invention may be used for immunohistochemistry applications. For example, they may be used for immunolocalization of a particular antigen or group of antigens in a tissue. Tissue can be fixed and incubated with antigen-binding constructs of interest. These constructs can then be localized using a secondary antibody or binding construct of the invention coupled to a label, for example, to a gold particle or an enzyme that gives a chemical reaction, like horseradish peroxidase or beta-galactosidase. A secondary antibody or binding construct is frequently made that is reactive against, for example, a portion of the primary binding construct. Thus, for example, if the primary binding construct has a human tail portion, the secondary antibody or binding construct could be, for example, a rabbit anti-mouse antibody or antigen-binding construct that has been linked to beta-galactosidase. Alternatively the antibody or binding construct of the invention can be purified and then conjugated to another molecule to produce a fluorescent antibody or binding construct.

[0503] Constructs, including antigen-binding contructs of the invention can also be used to detect the location of an antigen or antigens on the surface of cells or to detect the location of intracellular materials using, for example, Immunoelectron Microscopy. Electron dense materials such as ferritin or colloidal gold, for example, can be conjugated to an antigen-binding construct. Scanning electron microscopy can be used to detect the localization of the antigen/binding construct complex.

[0504] Constructs, including antigen-binding constructs of the invention may also be used to quantitate the presence of an antigen or antigens using one of a variety of immunoassay formats, for example, a radioimmunoassay (RIA) format or an enzyme-linked immunosorbent assay (ELISA) format. There are many variants of these approaches, but those are based on a similar idea. For example, if an antigen can be bound to a solid support or surface, or is in solution, it can be detected by reacting it with a specific antigen-binding construct of the invention. The presence or amount of the construct can then be detected or quantitated by reacting it with, for example, either a secondary antibody or a second antigen-binding construct of the invention by incorporating a label directly into the primary antibody. Alternatively, for example, an antigen-binding polypeptide of the invention can be bound to a solid surface and the antigen added. A second antibody or antigen-binding polypeptide(s) of the invention that recognizes a distinct epitope on the antigen can then be added and detected. This technique is commonly referred to as a “sandwich assay”, which is frequently used to avoid problems of high background or non-specific reactions, among other reasons.

[0505] Because the binding constructs of the invention can have high affinity/affinities and/or selectivity/selectivities for a particular epitope or epitopes, they can also be used as affinity reagents, for example, in protein or antigen purification. In one example of such a process, antigen-binding constructs of the invention are immobilized on a suitable support, for example, Sephadex resin or filter paper. The immobilized construct is exposed to a sample containing, or suspected of containing, a target protein(s) or antigen(s). The support is rinsed with a suitable buffer that will remove unwanted materials. The support is washed with another buffer that will release the bound protein(s) or antigen(s).

[0506] Because particular binding constructs of the invention can bind to proteins or other antigens with high affinity and selectivity they can also be used as a criterion for the importance of a particular enzyme or other macromolecule in a particular reaction. If an antigen-binding construct of the invention can interfere with a reaction in a solution, this will indicate that the construct may be binding specifically to a protein or other antigenic material involved in that reaction.

[0507] Constructs, including antigen-binding constructs of the invention can also be used as receptor blockers or inhibitors or antagonists.

[0508] Constructs, including antigen-binding contructs of the invention can also be used in identifying and studying the function(s) of proteins. If an antigen-binding construct of the invention reacts with a specific protein, for example, that protein can subsequently be precipitated from solution, for example. Precipitation is typically performed by using a secondary antibody or antigen-binding construct of the invention that links primary complexes together. Alternatively, the complex can be removed by reacting the solution with either protein A or, for example, depending on the construct, an anti-Fc antibody, for example, which has been attached to beads, for example, so that can be easily removed form the solution.

[0509] Constructs, including antigen-binding constructs of the invention can also be used in conjunction with gel-shift experiments to identify specific nucleic acid-binding proteins such as DNA-binding proteins. For example, DNA-binding proteins can be assayed by their ability to bind with high affinity to a particular oligonucleotide. The mobility of an oligonucleotide associated with the protein is far different than the mobility of a free oligonucleotide and results in a gel migration pattern and signal that is commonly referred to as a gel shift. The addition of the construct to the binding assay can have either of two effects. If the construct binds to a region of a protein not involved in DNA binding it can result in a complex that has even a slower mobility and is detected as a greater shift in mobility (a super-shift). Alternatively, if the construct binds to a region of the protein involved in recognizing the DNA then it can disrupt the binding and eliminate the shift. In either case, the data from these experiments can serve as a criterion to identify a DNA-binding protein, for example.

[0510] It is also possible to use constructs, including antigen-binding constructs of the invention to detect a protein by western blotting after fractionation by SDS-PAGE, for example. Once fractionated proteins are transferred to a membrane such as a nitrocellulose sheet, they are exposed to a particular antigen-binding construct of the invention that specifically recognizes, or recognizes to a desired degree of selectivity, proteins immobilized to the blot. This allows particular proteins to be identified. This approach is particularly useful if the mobility of the protein changes during an experiment. For example, incorporation of a phosphate or a carbohydrate, or cleavage of the protein, results in a change in mobility that can be followed in straight forward manner by western analysis. With appropriate controls, this approach can be used to measure the abundance of a protein in response to experimental manipulations.

[0511] The combination of SDS gels and immunoprecipitation can also be extremely effective. If a particular protein can be immunoprecipitated in a solution, both supernatant and precipitated fractions can be separated on an SDS gel and studied using an antigen-binding constructs of the invention.

[0512] Sometimes a binding construct of the invention directed against one protein will also precipitate a second protein that interacts with the first protein. The second protein, as well as the first, can then be seen by staining the gel or by autoradiography. This relationship is frequently the first indication that a protein functions as part of a complex and it can also be used to demonstrate a physical interaction of two proteins that are hypothesized to interact on the basis of other evidence (e.g., a two hybrid screen or a supressor mutation). This approach can be combined with western blotting analysis in several extremely effective ways.

[0513] Thus, for example, antigen-binding constructs of the invention can be used in a combination of immunoprecipitation and western analysis in the study, for example, of signal transduction and protein processing. For example, an immunoprecipitated protein can be subsequently studied by western analysis using a different antibody or antigen-binding construct of the invention that binds to the protein. The most useful of are those that are directed against particular structural determinants that may be present in a protein. Thus, an antibody or antigen-binding construct of the invention directed against a region of the protein that undergoes proteolytic processing can be useful to follow proteolytic processing. Additionally, a construct of the invention or a mixture of antigen-binding constructs of the invention that recognize phophorylated peptides (e.g., anti PY (phosphorylated tyrosine) can be used to follow the extent of phosphorylation of a protein (using western analysis) after it is precipitated, or visa versa. Glycosylation reactions can also be followed by antigen-binding constructs of the invention directed against a carbohydrate epitope (or by lectins, i.e., proteins that recognize carbohydrates). Likewise, some antigen-binding constructs of the invention can be made that specifically recognize a phosphorylated epitope, for example, that will recognize a tyrosine or a serine residue after phosphorylation, but will not bind (or detectably bind) the epitope in the absence of phosphate. This approach can be used to determine the phosphorylation state of a particular protein. For example, the phosphorylation of CREB (the cAMP response element binding protein) can be followed by an antibody that specifically recognizes an epitope in a way that is dependent on the phosphorylation of serine 133.

[0514] Constructs, including antigen-binding constructs of the invention can also be used to screen expression libraries to isolate candidate polynucleotides that express or present a particular epitope, or that have a particular affinity or expression characteristic.

[0515] Constructs, including antigen-binding constructs of the invention that bind to a cell surface can also be used as a marker to quantitate the fraction of cells expressing that marker using flow cytometry. If different antigen-binding constructs of the invention/fluorescent dye combinations are used, for example, the fraction of cells expressing several antigens can be determined.

[0516] Constructs, including antigen-binding constructs of the invention that function like anti-idiotype antibodies, i.e., antibodies against the binding domain of another antibody, can be used in any of a number of methods in which is would be desireable or useful to mimic the structure of an antigen. Such uses include, for example, uses as cancer vaccines (including antigen-binding constructs of the invention that incorporate a molecular adjuvant), as probes for receptors, as receptor agonists, as receptor antagonists, as receptor blockers or inhibitors, and so on.

[0517] In another aspect, constructs, including antigen-binding constructs of the invention may bispecific and thus capable of binding to two distinct epitopes, which may be present on the same or different cell types.

[0518] In vivo uses of constructs of the invention, including antigen-binding constructs, include therapy, alone or in combination with one or more other therapies, for various diseases including cancers as well as B-cell disorders including autoimmune diseases. In some cases the constructs of the invention are administered to a patient. In other cases, the construct may be coupled to another molecule by techniques known in the art, for example, a fluorescent molecule to aid in imaging a target, or a therapeutic drug and/or a toxin to aid in killing a target.

[0519] For example, a labeling molecule or atom can be conjugated or otherwise linked to the antigen-binding construct of the invention to aid in imaging or as a diagnostic agent. These include, but are not limited to enzymatic labels, radioisotopes or radioactive compounds or elements, fluorescent compounds or metals, chemiluminescent compounds and bioluminescent compounds. Thus, binding contructs or antigen-binding constructs of the invention can be conjugated to a drug, which allows specific drug targeting and increased efficiency once the drug reaches the target. This facilitates drug therapy while reducing systemic toxicity and side effects. This allows use of drugs that would otherwise be unacceptable when administered systemically. Dosage will depend on the potency of the drug and the efficiency of the carrier construct. Other examples of in vivo uses include the use of binding constructs or antigen-binding constructs of the invention in which a toxin is chemically linked or conjugated to an polypeptide of the invention to form, for example, molecules that may be termed “immunoconjugates” or “immunotoxins.” Typically, for example, such a toxin may include one ore more radioisotopes (for example, Iodine-131, Yttrium-90, Rhenium-186, Copper-67, and/or Bishmuth-212), natural toxins, chemotherapy agents, biological response modifiers, or any other substance that is capable of assisting in damaging or killing a target cell, inhibiting target cell replication, or is effective in disrupting a desired cellular function in a target cell.

[0520] The toxin portion of the immunotoxin can be derived form various sources. Toxins are commonly derived from plants or bacteria, but toxins of human origin or synthetic toxins can be used as well, for example. Examples of toxins derived from bacteria or plants include, but are not limited to, abrin, α-sarcin, diptheria toxin, ricin, saporin, and pseudomonas exotoxin. Examples of mammalian enzymes include, but are not limited to, ribonucleases (RNAse) and deoxyribonucleases. Numerous immunotoxins that may be used with one or more constructs of the invention have been described in the art. See, for example, U.S. Pat. No. 4,753,894 to Frankel et al.; U.S. Pat. No. 6,099,842 to Pastan et al.; Nevelle, et al., 1982 Immunol Rev. 62: 75-91; Pastan et al., 1992 Ann Rev Biochem 61: 331-354; Chaudary et al., 1989 Nature 339: 394; and Batra et al., 1991 Mol. Cell. Biol. 11: 2200. Modified toxins described herein and those described in the various publications are also within the scope of the instant invention.

[0521] Generally, the immunotoxins and other therapeutic agents of this invention are administered at a concentration that is therapeutically effective to treat or prevent a particular disease, disorder, or condition, such as for the treatment of tumors and malignancies, the treatment of autoimmune diseases, allergies and inflammation, etc. This effective dosage and mode of administration will depend on the animal or patient being treated, the disease or condition being treated, the strength of the immunoconjugates or immunotoxins and the efficiency of the conjugate. To accomplish this goal, the immunotoxins may be formulated using a variety of acceptable formulations and excipients known in the art. Typically, for example, the immunotoxins are administered by injection, either intravenously or intraperitoneally. Methods to accomplish this administration are known to those of ordinary skill in the art. It another aspect, the invention includes topically or orally administered compositions such as an aerosol or cream or patch that may be capable of transmission across mucous membranes.

[0522] Formulants may be added to an immunoconjugates or immunotoxins of the invention before administration to a patients being treated. A liquid formulation is most common, but other formulations are within the scope of the invention. The formulants may include for example oils, polymers, vitamins, carbohydrates, amino acids, salts, buffers, albumin, surfactants, or bulking agents. Carbohydrates can include sugar or sugar alcohols such as mono, di, or polysaccharides, or water-soluble glucans. The saccharides or glucans can include for example fructose, dextrose, lactose, glucose, mannose, sorbose, xylose, maltose, sucrose, dextran, pullulan, dextrin, alpha and beta cyclodextrin, soluble starch, hydroxethyl starch and carboxymethylcellulose, or mixtures thereof. “Sugar alcohol” may be defined as a C₄ to C₈ hydrocarbon having an —OH group and includes, for example, galactitol, inositol, mannitol, xylitol, sorbitol, glycerol, and arabitol. These sugars or sugar alcohols mentioned above may be used individually or in combination. There is no fixed limit to the amount used as long as the sugar or sugar alcohol is soluble in the aqueous preparation. In one aspect, the sugar or sugar alcohol concentration is between 0.5 w/v % and 15 w/v %, typically between 1.0 w/v % and 7.0 w/v %, more typically between 2.0 and 6.0w/v %.

[0523] Exemplary amino acids include levorotary (L) forms of camitine, arginine, and betaine; however, other amino acids may be added. Commonly used polymers include polyvinylpyrrolidone (PVP) with an average molecular weight between 2,000 and 3,000, for example, or polyethylene glycol (PEG) with an average molecular weight between 3,000 and 5,000, for example. A buffer can be used in the composition to minimize pH changes in the solution before lyophilization or after reconstitution. Any physiological buffer may be used, but citrate, phosphate, succinate, and glutamate buffers or mixtures thereof are more commonly utilized. The concentration can be, for example, from 0.01 to 0.3 molar. Higher or lower concentrations may be used.

[0524] Immunotoxins of the invention can be chemically modified by covalent conjugation to a polymer to increase their circulating half-life, for example. Exemplary polymers and methods to attach them to peptides are referenced in U.S. Pat. No. 4,766,106 to Katre et al.; 4,179,337 to Davis et al.; 4,495,285 to Shimizu et al.; and U.S. Pat. No. 4,609,546 to Hiratani.

[0525] The following Examples are offered by way of illustration and not by way of limitation.

### EXAMPLES

### Example 1

### Cloning of the 2H7 Variable Regions and Construction and Sequencing of 2H7ScFv-Ig

[0526] This Example illustrates the cloning of cDNA molecules that encode the heavy chain and light chain variable regions of the monoclonal antibody 2H7. This Example also demonstrates the construction, sequencing, and expression of 2H7scFv-Ig.

[0527] Hybridoma cells expressing 2H7 monoclonal antibody that specifically bound to CD20 were provided by Ed Clark at the University of Washington, Seattle, Wash. Prior to harvesting, hybridoma cells were kept in log phase growth for several days in RPMI 1640 media Invitrogen/Life Technologies, Gaithersburg, Md.) supplemented with glutamine, pyruvate, DMEM non-essential amino acids, and penicillin-streptomycin. Cells were pelleted by centrifugation from the culture medium, and 2×10⁷ cells were used to prepare RNA. RNA was isolated from the 2H7-producing hybridoma cells using the Pharmingen (San Diego, Calif.) total RNA isolation kit (Catalog # 45520K) according to the manufacturer's instructions accompanying the kit. One microgram (1 μg) of total RNA was used as template to prepare cDNA by reverse transcription. The RNA and 300 ng random primers were combined and denatured at 72° C. for 10 minutes prior to addition of enzyme. Superscript II reverse transcriptase (Life Technologies) was added to the RNA plus-primer mixture in a total volume of 25 μl in the presence of 5×second strand buffer and 0.1 M DTT provided with the enzyme. The reverse transcription reaction was allowed to proceed at 42° C. for one hour.

[0528] The 2H7 cDNA generated in the randomly primed reverse transcriptase reaction and V region specific primers were used to amplify by PCR the variable regions for the light and heavy chain of the 2H7 antibody. The V region specific primers were designed using the published sequence (Genbank accession numbers M17954 for V_{L} and M17953 for V_{H}) as a guide. The two variable chains were designed with compatible end sequences so that an scFv could be assembled by ligation of the two V regions after amplification and restriction enzyme digestion.

[0529] A (gly₄ser)₃ peptide linker to be inserted between the two V regions was incorporated by adding the extra nucleotides to the antisense primer for the V_{L} of 2H7. A Sac I restriction site was also introduced at the junction between the two V regions. The sense primer used to amplify the 2H7 V_{L}, that included a HindIII restriction site and the light chain leader peptide was 5′-gtc aag ctt gcc gcc atg gat ttt caa gtg cag att ttt cag c-3′ (SEQ ID NO:______. The antisense primer was 5′-gtc gtc gag ctc cca cct cct cca gat cca cca ccg ccc gag cca ccg cca cct ttc agc tcc agc ttg gtc cc-3′ (SEQ ID NO:______. The reading frame of the V region is indicated as a bold, underlined codon. The Hind III and SacI sites are indicated by underlined italicized sequences.

[0530] The V_{H} domain was amplified without a leader peptide, but included a 5′ SacI restriction site for fusion to the V_{L} and a BclI restriction site at the 3′ end for fusion to various tails, including the human IgG1 Fc domain and the truncated forms of CD40 ligand, CD154. The sense primer was 5′-gct gct gag ctc tca ggc tta tct aca gca agt ctg g-3′ (SEQ ID NO:______). The SacI site is indicated in italicized and underlined font, and the reading frame of the codon for the first amino acid of the V_{H} domain is indicated in bold, underlined type. The antisense primer was 5′-gtt gtc tga tca gag acg gtg acc gtg gtc cc-3′ (SEQ ID NO:______). The BclI site is indicated in italicized, underlined type, and the last serine of the V_{H} domain sequence is indicated in bold, underlined type.

[0531] The scFv-Ig was assembled by inserting the 2H7 scFv HindIII-BclI fragment into pUC 19 containing the human IgG1 hinge, CH2, and CH3 regions, which was digested with restriction enzymes, HindIII and BclI. After ligation, the ligation products were transformed into DH5α bacteria. Positive clones were screened for the properly inserted fragments using the SacI site at the V_{L}-V_{H} junction of 2H7 as a diagnostic site. The 2H7scFv-Ig cDNA was subjected to cycle sequencing on a PE 9700 thermocycler using a 25-cycle program by denaturing at 96° C. for 10 seconds, annealing at 50° C. for 30 seconds, and extending at 72° C. for 4 minutes. The sequencing primers were pUC forward and reverse primers and an internal primer that annealed to the CH2 domain human in the IgG constant region portion. Sequencing reactions were performed using the Big Dye Terminator Ready Sequencing Mix (PE-Applied Biosystems, Foster City, Calif.) according to the manufacturer's instructions. Samples were subsequently purified using Centrisep columns (Catalog # CS-901, Princeton Separations, Adelphia, N.J.), the eluates dried in a Savant vacuum dryer, denatured in Template Suppression Reagent (PE-ABI), and analyzed on an ABI 310 Genetic Analyzer (PE-Applied Biosystems). The sequence was edited, translated, and analyzed using Vector Nti version 6.0 (Informax, North Bethesda, Md.). FIG. 1 shows the cDNA and predicted amino acid sequence of the 2H7scFv-Ig construct.

### Example 2

### Expression of 2H7 scFv-Ig 1N Stable CHO Cell Lines

[0532] This Example illustrates expression of 2H7scFv-Ig in a eukaryotic cell line and characterization of the expressed 2H7scFv-Ig by SDS-PAGE and by functional assays, including ADCC and complement fixation.

[0533] The 2H7scFv-Ig HindIII-XbaI (−1.6 kb) fragment with correct sequence was inserted into the mammalian expression vector pD18, and DNA from positive clones was amplified using QIAGEN plasmid preparation kits (QIAGEN, Valencia, Calif.). The recombinant plasmid DNA (100 μg) was then linearized in a nonessential region by digestion with AscI, purified by phenol extraction, and resuspended in tissue culture media, Excell 302 (Catalog # 14312-79P, JRH Biosciences, Lenexa, Kans.). Cells for transfection, CHO DG44 cells, were kept in logarithmic growth, and 10⁷ cells harvested for each transfection reaction. Linearized DNA was added to the CHO cells in a total volume of 0.8 ml for electroporation.

[0534] Stable production of the 2H7 scFv-Ig fusion protein (SEQ. ID NO: 10) was achieved by electroporation of a selectable, amplifiable plasmid, pD18, containing the 2H7 scFv-Ig cDNA under the control of the CMV promoter, into Chinese Hamster Ovary (CHO) cells (all cell lines from American Type Culture Collection, Manassas, Va., unless otherwise noted). The 2H7 expression cassette was subcloned downstream of the CMV promoter into the vector multiple cloning site as a ˜1.6 kb HindIII-XbaI fragment. The pD18 vector is a modified version of pcDNA3 encoding the DHFR selectable marker with an attenuated promoter to increase selection pressure for the plasmid. Plasmid DNA was prepared using Qiagen maxiprep kits, and purified plasmid was linearized at a unique AscI site prior to phenol extraction and ethanol precipitation. Salmon sperm DNA (Sigma-Aldrich, St. Louis, Mo.) was added as carrier DNA, and 1001g each of plasmid and carrier DNA was used to transfect 10⁷ CHO DG44 cells by electroporation. Cells were grown to logarithmic phase in Excell 302 media (JRH Biosciences) containing glutamine (4 mM), pyruvate, recombinant insulin, penicillin-streptomycin, and 2×DMEM nonessential amino acids (all from Life Technologies, Gaithersburg, Md.), hereafter referred to as “Excell 302 complete” media. Media for untransfected cells also contained HT (diluted from a 100×solution of hypoxanthine and thymidine) (Invitrogen/Life Technologies). Media for transfections under selection contained varying levels of methotrexate (Sigma-Aldrich) as selective agent, ranging from 50 nM to 5 μM. Electroporations were performed at 275 volts, 950 μF. Transfected cells were allowed to recover overnight in non-selective media prior to selective plating in 96 well flat bottom plates (Costar) at varying serial dilutions ranging from 125 cells/well to 2000 cells/well. Culture media for cell cloning was Excell 302 complete, containing 100 nM methotrexate. Once clonal outgrowth was sufficient, serial dilutions of culture supernatants from master wells were screened for binding to CD20-CHO transfected cells. The clones with the highest production of the fusion protein were expanded into T25 and then T75 flasks to provide adequate numbers of cells for freezing and for scaling up production of the 2H7scFvIg. Production levels were further increased in cultures from three clones by progressive amplification in methotrexate containing culture media. At each successive passage of cells, the Excell 302 complete media contained an increased concentration of methotrexate, such that only the cells that amplified the DHFR plasmid could survive.

[0535] Supernatants were collected from CHO cells expressing the 2H7scFv-Ig, filtered through 0.2 μm PES express filters (Nalgene, Rochester, N.Y.) and were passed over a Protein A-agarose (IPA 300 crosslinked agarose) column (Repligen, Needham, Mass.). The column was washed with PBS, and then bound protein was eluted using 0.1 M citrate buffer, pH 3.0. Fractions were collected and eluted protein was neutralized using 1M Tris, pH 8.0, prior to dialysis overnight in PBS. Concentration of the purified 2H7scFv-Ig (SEQ ID NO:______was determined by absorption at 280 nm. An extinction coefficient of 1.77 was determined using the protein analysis tools in the Vector Nti Version 6.0 Software package (Informax, North Bethesda, Md.). This program uses the amino acid composition data to calculate extinction coefficients.

[0536] Production levels of 2H7scFv-Ig by transfected, stable CHO cells were analyzed by flow cytometry. Purified 2H7scFv-Ig to CHO cells was allowed to bind to CHO cells that expressed CD20 (CD20 CHO) and analyzed by flow cytometry using a fluorescein-conjugated anti-human IgG second step reagent (Catalog Numbers H10101 and H10501, CalTag, Burlingame, Calif.). FIG. 2 (top) shows a standard curve generated by titration of 2H7scFv-Ig binding to CD20 CHO. At each concentration of 2H7scFv-Ig, the mean brightness of the fluorescein signal in linear units is shown. Supernatants collected from T flasks containing stable CHO cell clones expressing 2H7scFv-1 g were then allowed to bind to CD20 CHO and the binding was analyzed by flow cytometry. The fluorescein signal generated by 2H7scFv-Ig contained in the supernatants was measured and the 2H7scFv-Ig concentration in the supernatants was calculated from the standard curve (FIG. 2, bottom).

[0537] Purified 2H7scFv-Ig (SEQ ID NO:______) was analyzed by electrophoresis on SDS-Polyacrylamide gels. Samples of 2H7scFv-Ig, purified by independent Protein A Agarose column runs, were boiled in SDS sample buffer without reduction of disulfide bonds and applied to SDS 10% Tris-BIS gels (Catalog # NP0301, Novex, Carlsbad, Calif.). Twenty micrograms of each purified batch was loaded on the gels. The proteins were visualized after electrophoresis by Coomassie Blue staining (Pierce Gel Code Blue Stain Reagent, Catalog #24590, Pierce, Rockford, Ill.), and destaining in distilled water. Molecular weight markers were included on the same gel (Kaleidoscope Prestained Standards, Catalog # 161-0324, Bio-Rad, Hercules, Calif.). The results are presented in FIG. 3. The numbers above the lanes designate independent purification batches. The molecular weights in kilodaltons of the size markers are indicated on the left side of the figure. Further experiments with alternative sample preparation conditions indicated that reduction of disulfide bonds by boiling the protein in SDS sample buffer containing DTT or 2-mercaptoethanol caused the 2H7scFv-Ig to aggregate.

[0538] Any number of other immunological parameters may be monitored using routine assays that are well known in the art. These may include, for example, antibody dependent cell-mediated cytotoxicity (ADCC) assays, secondary in vitro antibody responses, flow immunocytofluorimetric analysis of various peripheral blood or lymphoid mononuclear cell subpopulations using well established marker antigen systems, immunohistochemistry or other relevant assays. These and other assays may be found, for example, in Rose et al. (Eds.), Manual of Clinical Laboratory Immunology, 5^{th} Ed., 1997 American Society of Microbiology, Washington, D.C.

[0539] The ability of 2H7scFv-Ig to kill CD20 positive cells in the presence of complement was tested using B cell lines Ramos and Bjab. Rabbit complement (Pel-Freez, Rogers, Ariz.) was used in the assay at a final dilution of 1/10. Purified 2H7scFv-Ig was incubated with B cells and complement for 45 minutes at 37° C., followed by counting of live and dead cells by trypan blue exclusion. The results in FIG. 4A show that in the presence of rabbit complement, 2H7scFv-Ig lysed B cells expressing CD20.

[0540] The ability of 2H7scFv-Ig to kill CD20 positive cells in the presence of peripheral blood mononuclear cells (PBMC) was tested by measuring the release of ⁵¹Cr from labeled Bjab cells in a 4-hour assay using a 100:1 ratio of PBMC to Bjab cells. The results shown in FIG. 4B indicated that 2H7scFv-Ig can mediate antibody dependent cellular cytotoxicity (ADCC) because the release of ⁵¹Cr was higher in the presence of both PBMC and 2H7scFv-Ig than in the presence of either PBMC or 2H7scFv-Ig alone.

### Example 3

### Effect of Simultaneous Ligation of CD20 and CD400N Growth of Normal B Cells, and on CD95 Expression, and Induction of Apoptosis

[0541] This example illustrates the effect of cross-linking of CD20 and CD40 expressed on the cell surface on cell proliferation.

[0542] Dense resting B cells were isolated from human tonsil by a Percoll step gradient and T cells were removed by E-rosetting. Proliferation of resting, dense tonsillar B cells was measured by uptake of ³[H]-thymidine during the last 12 hours of a 4-day experiment. Proliferation was measured in quadruplicate cultures with means and standard deviations as shown. Murine anti-human CD20 monoclonal antibody 1F5 (anti-CD20) was used alone or was cross-linked with anti-murine K monoclonal antibody 187.1 (anti-CD20XL). CD40 activation was accomplished using soluble human CD154 fused with murine CD8 (CD154) (Hollenbaugh et al., EMBO J. 11: 4212-21 (1992)), and CD40 cross-linking was accomplished using anti-murine CD8 monoclonal antibody 53-6 (CD154XL). This procedure allowed simultaneous cross-linking of CD20 and CD40 on the cell surface. The results are presented in FIG. 5.

[0543] The effect of CD20 and CD40 cross-linking on Ramos cells, a B lymphoma cell line, was examined. Ramos cells were analyzed for CD95 (Fas) expression and percent apoptosis eighteen hours after treatment (no goat anti-mouse IgG (GAM)) and/or cross-linking (+GAM) using murine monoclonal antibodies that specifically bind CD20 (1F5) and CD40 (G28-5). Control cells were treated with a non-binding isotype control (64.1) specific for CD3.

[0544] Treated Ramos cells were harvested, incubated with FITC-anti-CD95, and analyzed by flow cytometry to determine the relative expression level of Fas on the cell surface after CD20 or CD40 cross-linking. Data is plotted as mean fluorescence of cells after treatment with the stimuli indicated (FIG. 6A).

[0545] Treated Ramos cells from the same experiment were harvested and binding of annexin V was measured to indicate the percentage apoptosis in the treated cultures. Apoptosis was measured by binding of Annexin V 18 hours after cross-linking of CD20 and CD40 using 1F5 and G28-5 followed by cross-linking with GAM. Binding of Annexin V was measured using a FITC-Annexin V kit (Catalog # PN-IM2376, Immunotech, Marseille, France,). Annexin V binding is known to be an early event in progression of cells into apoptosis. Apoptosis, or, programmed cell death, is a process characterized by a cascade of catabolic reactions leading to cell death by suicide. In the early phase of apoptosis, before cells change morphology and hydrolyze DNA, the integrity of the cell membrane is maintained but cells lose the asymmetry of their membrane phospholipids, exposing negatively charged phospholipids, such as phosphatidylserine, at the cell surface. Annexin V, a calcium and phopholipid binding protein, binds preferentially and with high affinity to phosphatidylserine. Results demonstrating the effect of cross-linking both CD20 and CD40 on expression of the FAS receptor (CD95) are presented in FIG. 6B. The effect of cross-linking of both CD20 and CD40 on Annexin V binding to cells is shown in FIG. 6B.

### Example 4

### Construction and Characterization of 2H7 scFv-CD154 Fusion Proteins

[0546] To construct a molecule capable of binding to both CD20 and CD40, cDNA encoding the 2H7 scFv was fused with cDNA encoding CD154, the CD40 ligand. The 2H7 scFv cDNA encoded on the HindIII-BclI fragment was removed from the 2H7 scFvIg construct, and inserted into a pD18 vector along with a BamHI-XbaI cDNA fragment encoding the extracellular domain of human CD154. The extracellular domain is encoded at the carboxy terminus of CD154, similar to other type II membrane proteins.

[0547] The extracellular domain of human CD154 was PCR amplified using cDNA generated with random primers and RNA from human T lymphocytes activated with PHA (phytohemagglutinin). The primer sets included two different 5′ or sense primers that created fusion junctions at two different positions within the extracellular domain of CD 154. Two different fusion junctions were designed that resulted in a short or truncated form (form S4) including amino acids 108 (Glu)−261 (Leu)+(Glu), and a long or complete form (form L2) including amino acids 48 (Arg)−261 (Leu)+(Glu), of the extracellular domain of CD154, both constructed as BamHI-XbaI fragments. The sense primer which fuses the two different truncated extracellular domains to the 2H7scFv includes a BamHI site for cloning. The sense primer for the S4 form of the CD154 cDNA is designated SEQUENCE ID NO: 11 or CD154BAM108 and encodes a 34 mer with the following sequence: 5′-gtt gtc gga tcc aga aaa cag ctt tga aat gca a-3′, while the antisense primer is designated SEQUENCE ID NO: 12 or CD154XBA and encodes a 44 mer with the following sequence: 5′-gtt gtt tct aga tta tca ctc gag ttt gag taa gcc aaa gga cg-3′.

[0548] The oligonucleotide primers used in amplifying the long form (L2) of the CD154 extracellular domain encoding amino acids 48 (Arg)−261 (Leu)+(Glu), were as follows: The sense primer designated CD154 BAM48 (SEQUENCE ID NO:13) encoded a 35-mer with the following sequence: 5′-gtt gtc gga tcc aag aag gtt gga caa gat aga ag-3′. The antisense primer designated or CD154XBA (SEQUENCE ID NO:______encoded the 44-mer: 5′-gtt gtt tct aga tta tca ctc gag ttt gag taa gcc aaa gga cg-3′. Other PCR reaction conditions were identical to those used for amplifying the 2H7 scFv (see Example 1). PCR fragments were purified by PCR quick kits (QIAGEN, San Diego, Calif.), eluted in 30 μl ddH₂O, and digested with BamHI and XbaI (Roche) restriction endonucleases in a 40 μl reaction volume at 37° C. for 3 hours. Fragments were gel purified, purified using QIAEX kits according to the manufacturer's instructions (QIAGEN), and ligated along with the 2H7 HindIII-BclI fragment into the pD 18 expression vector digested with HindIII+XbaI. Ligation reactions were transformed into DH5-alpha chemically competent bacteria and plated onto LB plates containing 100 μg/ml ampicillin. Transform ants were grown overnight at 37° C., and isolated colonies used to inoculate 3 ml liquid cultures in Luria Broth containing 100 μg/ml ampicillin. Clones were screened after mini-plasmid preparations (QIAGEN) for insertion of both the 2H7 scFv and the CD154 extracellular domain fragments.

[0549] The 2H7scFv-CD154 construct cDNAs were subjected to cycle sequencing on a PE 9700 thermocycler using a 25-cycle program that included denaturating at 96° C., 10 seconds, annealing at 50° C. for 5 seconds, and extension at 60° C., for 4 minutes. The sequencing primers used were pD18 forward (SEQ ID NO:______: 5′-gtctatataagcagagctctggc-3′) and pD18 reverse (SEQ ID NO:______: 5′-cgaggctgatcagcgagctctagca-3′) primers. In addition, an internal primer was used that had homology to the human CD154 sequence (SEQ ID NO:______: 5′-ccgcaatttgaggattctgatcacc-3′). Sequencing reactions included primers at 3.2 pmol, approximately 200 ng DNA template, and 8 μl sequencing mix. Sequencing reactions were performed using the Big Dye Terminator Ready Sequencing Mix (PE-Applied Biosystems, Foster City, Calif.) according to the manufacturer's instructions. Samples were subsequently purified using Centrisep columns (Princeton Separations, Adelphia, N.J.). The eluates were dried in a Savant speed-vacuum dryer, denatured in 20 μl template Suppression Reagent (ABI) at 95° C. for 2 minutes, and analyzed on an ABI 310 Genetic Analyzer (PE-Applied Biosystems). The sequence was edited, translated, and analyzed using Vector Nti version 6.0 (Informax, North Bethesda, Md.). The 2H7scFv-CD154 L2 cDNA sequence and predicted amino acid sequence is presented in FIG. 7A, and 2H7scFv-CD154 S4 cDNA sequence and predicted amino acid sequence is presented in FIG. 7B.

[0550] The binding activity of the 2H7 scFv-CD154 fusion proteins (SEQ. ID NO: ______ and ______) to CD20 and CD40 simultaneously was determined by flow cytometry. The assay used CHO cell targets that express CD20. After a 45-minute incubation of CD20 CHO cells with supernatants from cells transfected with the 2H7 scFv-CD154 expression plasmid, the CD20 CHO cells were washed twice and incubated with biotin-conjugated CD40-Ig fusion protein in PBS/2% FBS. After 45 min, cells were washed twice and incubated with phycoerythrin (PE)-labeled strepavidin at 1:100 in PBS/2% FBS (Molecular Probes, Eugene Oreg.). After an additional 30 min incubation, cells were washed 2× and were analyzed by flow cytometry. The results show that the 2H7 scFv-CD154 molecule was able to bind to CD20 on the cell surface and to capture biotin-conjugated CD40 from solution (FIG. 8).

[0551] To determine the effect of the 2H7scFv-CD154 on growth and viability of B lymphoma and lymphoblastoid cell lines, cells were incubated with 2H7scFv-CD154 L2 (SEQ. ID NO:______) for 12 hours and then examined for binding of Annexin V. Binding of Annexin V was measured using a FITC-Annexin V kit (Immunotech, Marseille, France, Catalog # PN-IM2376). B cell lines were incubated in 1 ml cultures with dilutions of concentrated, dialyzed supernatants from cells expressing secreted forms of the 2H7scFv-CD154 fusion proteins. The results are presented in FIG. 9.

[0552] The growth rate of the Ramos B lymphoma cell line in the presence of 2H7scFv-CD 154 was examined by uptake of ³H-thymidine for the last 6 hours of a 24-hour culture. The effect of 2H7scFv-CD154 on cell proliferation is shown in FIG. 10.

### Example 5

### Construction and Characterization of CytoxB Antibody Derivatives

[0553] CytoxB antibodies were derived from the 2H7 scFv-IgG polypeptide. The 2H7 scFv (see Example 1) was linked to the human IgG1 Fc domain via an altered hinge domain (see FIG. 11). Cysteine residues in the hinge region were substituted with serine residues by site-directed mutagenesis and other methods known in the art. The mutant hinge was fused either to a wild-type Fc domain to create one construct, designated CytoxB-MHWTG1C, or was fused to a mutated Fc domain (CytoxB-MHMG1C) that had additional mutations introduced into the CH2 domain. Amino acid residues in CH2 that are implicated in effector function are illustrated in FIG. 11. Mutations of one or more of these residues may reduce FcR binding and mediation of effector functions. In this example, the leucine residue 234 known in the art to be important to Fc receptor binding, was mutated in the 2H7 scFv fusion protein, CytoxB-[MG1H/MG1C]. In another construct, the human IgG1 hinge region was substituted with a portion of the human IgA hinge, which was fused to wild-type human Fc domain (CytoxB-IgAHWTHGI C). (See FIG. 11). This mutated hinge region allows expression of a mixture of monomeric and dimeric molecules that retain functional properties of the human IgG1 CH2 and CH3 domains. Synthetic, recombinant cDNA expression cassettes for these molecules were constructed and polypeptides were expressed in CHODG44 cells according to methods described in Example 2.

[0554] Purified fusion protein derivatives of CytoxB-scFvIg molecules were analyzed by SDS-PAGE according to the methods described in Example 2. Polyacrylamide gels were run under non-reducing and reducing conditions. Two different molecule weight marker sets, BioRad prestained markers, (BioRad, Hercules, Calif.) and Novex Multimark molecular weight markers were loaded onto each gel. The migration patterns of the different constructs and of Rituximab™ are presented in FIG. 12.

[0555] The ability of the different derivatives of CytoxB-scFvIg molecules to mediate ADCC was measured using the Bjab B lymphoma cells as the target and freshly prepared human PBMCs as effector cells. (See Example 2). Effector to target ratios were varied as follows: 70:1, 35:1, and 18:1, with the number of Bjab cells per well remaining constant but the number of PBMCs were varied. Bjab cells were labeled for 2 hours with ⁵¹Cr and aliquoted at a cell density of 5×10⁴ cells/well to each well of flat-bottom 96 well plates. Purified fusion proteins or rituximab were added at a concentration of 10 μg/ml to the various dilutions of PBMCs. Spontaneous release was measured without addition of PBMC or fusion protein, and maximal release was measured by the addition of detergent (1% NP-40) to the appropriate wells. Reactions were incubated for 4 hours, and 100 μl of culture supernatant was harvested to a Lumaplate (Packard Instruments) and allowed to dry overnight prior to counting cpm released. The results are presented in FIG. 13.

[0556] Complement dependent cytotoxicity (CDC) activity of the CytoxB derivatives was also measured. Reactions were performed essentially as described in Example 2. The results are presented in FIG. 14 as percent of dead cells to total cells for each concentration of fusion protein.

### Example 6

### In Vivo Studies in Macaques

[0557] Initial in vivo studies with CytoxB derivatives have been performed in nonhuman primates. FIG. 15 shows data characterizing the serum half-life of CytoxB in monkeys. Measurements were performed on serum samples obtained from two different macaques (J99231 and K99334) after doses of 6 mg/kg were administered to each monkey on the days indicated by arrows. For each sample, the level of 2H7scFvIg present was estimated by comparison to a standard curve generated by binding of purified CytoxB-(MHWTG1C)-1 g fusion protein to CD20 CHO cells (see Example 2). The data are tabulated in the bottom panel of the FIG. 15.

[0558] The effect of CytoxB-(MHWTG1 C)Ig fusion protein on levels of circulating CD40+ cells in macaques was investigated. Complete blood counts were performed at each of the days indicated in FIG. 16. In addition, FACS (fluorescence activated cell sorter) assays were performed on peripheral blood lymphocytes using a CD40-specific fluorescein conjugated antibody to detect B cells among the cell population. The percentage of positive cells was then used to calculate the number of B cells in the original samples. The data are graphed as thousands of B cells per microliter of blood measured at the days indicated after injection (FIG. 16).

### Example 7

### Construction and Expression of an Anti-CD19 scFv-Ig Fusion Protein

[0559] An anti-CD 19 scFv-Ig fusion protein was constructed, transfected into eukaryotic cells, and expressed according to methods presented in Examples 1, 2, and 5 and standard in the art. The variable heavy chain regions and variable light chain regions were cloned from RNA isolated from hybridoma cells producing antibody HD37, which specifically binds to CD19. Expression levels of a HD37scFv-IgAHWTG1C and a HD37scFv-IgMHWTG1C were measured and compared to a standard curve generated using purified HD37 scFvIg. The results are presented in FIG. 17.

### Example 8

### Construction and Expression of an Anti-L6 scFv-Ig Fusion Protein

[0560] An scFv-Ig fusion protein was constructed using variable regions derived from an anti-carcinoma monoclonal antibody, L6. The fusion protein was constructed, transfected into eukaryotic cells, and expressed according to methods presented in Examples 1, 2, and 5 and standard in the art. Expression levels of L6 scFv-IgAH WCH2 CH3 and L6 scFv-(SSS-S)H WCH2 WCH3 were measured and compared to a standard curve generated using purified L6 scFvIg. The results are presented in FIG. 18.

### Example 9

### Characterization of Various scFv-Ig Fusion Proteins

[0561] In addition to the scFv-Ig fusion protein already described, G28-1 (anti-CD37) scFv-Ig fusion proteins were prepared essentially as described in Examples 1 and 5. The variable regions of the heavy and light chains were cloned according to methods known in the art. ADCC activity of 2H7-MHWTG1C, 2H7-IgAHWTG1C, G28-1-MHWTG1C, G28-1 IgAHWTG1C, HD37-MHWTG1C, and HD37—IgAHWTG1C was determined according to methods described above (see Example 2). Results are presented in FIG. 19. ADCC activity of L6scFv-IgAHWTG1C and L6scFv-IgMHWTG1C was measured using the 2981 human lung carcinoma cell line. The results are presented in FIG. 20. The murine L6 monoclonal antibody is known not to exhibit ADCC activity.

[0562] The purified proteins were analyzed by SDS-PAGE under reducing and non-reducing conditions. Samples were prepared and gels run essentially as described in Examples 2 and 5. The results for the L6 and 2H7 scFv-Ig fusion proteins are presented in FIG. 21 and the results for the G28-1 and HD37 scFv-Ig fusion proteins are presented in FIG. 22.

### Example 10

### Construction and Expression of Anti-CD20 scFv-Llama Ig Fusion Proteins

[0563] This Example illustrates the cloning of llama IgG1, IgG2, and IgG3 constant region domains and the construction of immunoglobulin fusion proteins with each of the three constant regions and anti-CD20 scFv.

[0564] The constant regions of llama IgG1, IgG2, and IgG3 immunoglobulins were cloned and inserted into mammalian vector constructs containing an anti-CD20 single chain Fv, 2H7 scFv. Total RNA was isolated from peripheral blood mononuclear cells (PBMC) from llama blood (Triple J Farms, Bellingham, Wash.) by lysing the lymphocytes in TRIzol® (Invitrogen Life Technologies, Carlsbad, Calif.) according to the manufacturer's instructions. One microgram (1 μg) of total RNA was used as template to prepare cDNA by reverse transcription. The RNA and 200 ng random primers were combined and denatured at 72° C. for 10 minutes prior to addition of enzyme. Superscript II reverse transcriptase (Invitrogen Life Technologies) was added to the RNA plus primer mixture in a total volume of 25 μl in the presence of 5× second strand buffer and 0.1 M DTT provided with the enzyme. The reverse transcription reaction was allowed to proceed at 42° C. for one hour. The cDNA was amplified by PCR using sequence specific primers. The 5′ primers were designed according to published sequences for the V_{H}H and V_{H} domains of camelids. The 3′ primer, which was used to amplify all three isotypes, was designed using mammalian CH3 domain sequences as a guide. The following specific primers were used. The Bcl and XbaI sites are indicated by underlined italicized sequences.

5′ primer for llama IgG1 constant region

| | | |
|---|---|---|
| LLG1-5′bgl: | 5′-gtt gtt gat caa gaa | (SEQ ID NO: _{——}) |
| | cca cat gga gga tgc | |
| | acg tg-3′ | |

5′ primer for llama IgG2 constant region

| | | |
|---|---|---|
| LLG2-5′bgl: | 5′-gtt gtt gat caa gaa | (SEQ ID NO: _{——}) |
| | ccc aag aca cca aaa | |
| | cc-3′ | |

5′ primer for llama IgG3 constant region

| | | |
|---|---|---|
| LLG3-5′bgl: | 5′-gtt gtt gat caa gcg | (SEQ ID NO: _{——}) |
| | cac cac agc gaa gac | |
| | ccc-3′ | |

3′ primer for llama IgG1, IgG2, and IgG3 constant
regions

| | | |
|---|---|---|
| LLG123-3′X: | 5′-gtt gtt tct agatta | (SEQ ID NO: _{——}) |
| | cta ttt acc cga aga | |
| | ctg ggt gat gga-3′ | |

[0565] PCR fragments of the expected size were cloned into TOPO® cloning vectors (Invitrogen Life Technologies) and then were sequenced. The sense sequencing primer, LLseqsense, had the sequence 5′-ctg aga tcg agt tca gct g-3′ (SEQ ID NO:______), and the antisense primer, LLseqAS, had the sequence 5′-cct cct ttg gct ttg tct c-3′ (SEQ ID NO:______). Sequencing was performed as described in Example 1. FIG. 23 compares the amino acid sequence of the three isotype llama constant regions containing the hinge, CH2, and CH3 domains with the amino acid sequence of human IgG1 hinge, CH2, and CH3 domains.

[0566] After verifying the sequence, the amplified PCR products were digested with restriction enzymes BclI and Xbal to create compatible restriction sites. The digested fragments were then gel-purified, and the DNA was eluted using a QIAquick Gel Extraction Kit (QIAGEN, Valencia, Calif.). The 2H7scFv-Ig pD18 mammalian expression vector construct (see Example 2) was digested with BclI and XbaI to remove the human IgG hinge, CH2, and CH3 domains. The pD18 vector is a modified derivative of pcDNA3 that contains an attenuated DHFR gene, which serves as a selectable marker for mammalian expression (Hayden et al., Tissue Antigens 48: 242-54 (1996)). The purified llama IgG1, IgG2, and IgG3 constant region PCR products were ligated by T4 DNA ligase (Roche Molecular Biochemicals, Indianapolis, Ind.) into the double-digested 2H7 scFv-pD18 vector at room temperature overnight according to the manufacturer's instructions. After ligation, the ligation products were transformed into E. coli DH5α bacteria (BD Biosciences, Palo Alto, Calif.) and plated according to standard molecular biology procedures and manufacturer's instructions. Isolated colonies were chosen to screen for transformants containing the correct inserts.

[0567] For expression of the encoded polypeptides, plasmid DNA from positive clones was transiently transfected into COS-7 cells using DEAE-dextran (Hayden et al., Ther Immunol. 1: 3-15 (1994)). COS-7 cells were seeded at approximately 3×10 cells per 150 mm plate and grown overnight until the cells were about 75% confluent. Cells were then washed once with serum-free DMEM (Invitrogen Life Technologies, Grand Island, N.Y.). Transfection supernatant (10 ml) containing 400 μg/ml DEAE-dextran, 0.1 mM chloroquine, and 5 μg/ml of the DNA constructs were added to the cells, which were then incubated at 37° C. for 3-4 hrs. After incubation, cells were pulsed with 10 ml of 10% dimethyl sulfoxide (DMSO) in 1×PBS at room temperature for 2 minutes. Cells were then placed back into fully supplemented DMEM/10% FBS (1% L-glutamine, 1% penicillin/streptomycin, 1% sodium pyruvate, 1% MEM essential amino acids) (Invitrogen Life Technologies). After 24 hours, the media was replaced with serum-free fully supplemented DMEM (Invitrogen Life Technologies), and the cells were maintained up to 21 days with media changes every 3-4 days.

[0568] Ig-fusion proteins were purified by passing COS cell culture supernatants through Protein A Agarose (Repligen, Cambridge, Mass.) columns. After application of the culture supernatant, the Protein A columns were then washed with 1×PBS (Invitrogen Life Technologies). Bound Ig-fusion proteins were eluted with 0.1 M citric acid (pH 2.8), and the collected fractions were immediately neutralized with Tris base (pH 10.85). The fractions containing protein were identified by measuring the optical density (A₂₈₀) and then were pooled, dialyzed against 1×PBS, (Invitrogen Life Technologies) and filtered through a 0.2 μm filter.

[0569] The purified Ig-fusion proteins were analyzed by SDS-PAGE. Aliquots of 2H7 scFv-llama IgG1, 2H7 scFv-llama IgG2, 2H7 scFv-llama IgG3, and Rituxan® (Rituximab, anti-CD20 antibody, Genentech, Inc. and IDEC Pharmaceuticals Corp.) (provided by Dr. Oliver W. Press, Fred Hutchison Cancer Research Center, Seattle, Wash.) (5 μg protein) were combined with 25 μl 2× NuPAGE® SDS Sample Buffer (Invitrogen Life Technologies) (non-reduced samples). Samples of each protein were also prepared in reducing sample buffer containing 5% 2-mercaptoethanol (Sigma-Aldrich, St. Louis, Mo.). Molecular weight markers (Invitrogen Life Technologies) were applied to the gels in non-reducing buffer only. The proteins were fractionated on NuPAGE® 10% Bis-Tris gels (Invitrogen Life Technologies). After electrophoresis (approximately 1 hour), the gels were washed three times, five minutes each, with Distilled Water (Invitrogen Life Technologies) and then stained in 50 ml Bio-Safe Coommassie Stain (BioRad, Hercules, Calif.) overnight at room temperature. After a wash in Distilled Water, the gels were photographed. The migration pattern of each Ig-fusion protein is presented in FIG. 24.

[0570] The ability of the 2H7 scFv-llama Ig fusion proteins to bind to cells expressing CD20 was demonstrated by flow cytometry. Serial dilutions starting at 25 μg/ml of purified 2H7 scFv-llama IgG1, 2H7 scFv-llama IgG2, and 2H7 scFv-llama IgG3 were prepared and incubated with CD20-transfected (CD20+) CHO cells (from the laboratory of Dr. S. Skov, Institute of Medical Microbiology and Immunology, Copenhagen Denmark in 1% FBS 1×PBS media (Invitrogen Life Technologies) for one hour on ice. After the incubation, the cells were then centrifuged and washed with 1% FBS in 1×PBS. To detect bound 2H7 scFv-llama Ig, the cells were incubated for one hour on ice with fluorescein-conjugated goat anti-camelid IgG (heavy and light chain) (1:100) (Triple J Farms). The cells were then centrifuged and resuspended in 1% FBS-1×PBS and analyzed using a Coulter Epics XL cell sorter (Beckman Coulter, Miami, Fla.). The data (percent of maximum brightness) are presented in FIG. 25.

### Example 11

### Effector Function of Anti-CD20 scFv-Llama Ig Fusion Proteins

[0571] This Example demonstrates the ability of anti-CD20 llama IgG1, IgG2, and IgG3 fusion proteins to mediate complement dependent cytotoxicity (CDC) and antibody dependent cell-mediated cytotoxicity (ADCC).

[0572] The ability of the 2H7 scFv-llama IgG fusion proteins to kill CD20 positive cells in the presence of complement was tested using the BJAB human B cell line. Rabbit complement was obtained from 3-4 week old rabbits (Pel-Freez, Brown Deer, Wis.). BJAB cells (2×10⁶ cells/ml) were combined with rabbit complement (final dilution 1:10) and purified 2H7 Ig fusion proteins. 2H7 scFv-llama IgG1, 2H7 scFv-llama IgG2, 2H7 scFv-llama IgG3, and 2H7 scFv-human IgG1 wild type hinge-CH2-CH3) (Example 1) were added at 1:3 serial dilutions beginning at a concentration of 30 μg/ml. After one hour at 37° C., cell viability was determined by counting live and dead cells by trypan blue exclusion (0.4%) (Invitrogen Life Technologies) using a hemacytometer (Bright-line, Horsham, Pa.). The percent killing was calculated by dividing the number of dead cells by the number of total cells (dead+live cells). The data presented in FIG. 26 show that all Ig fusion proteins had CDC activity.

[0573] The ADCC activity of the 2H7 scFv-llama IgG fusion proteins was determined using BJAB cells as target cells and human or llama peripheral blood mononuclear cells (PBMC) as effector cells. BJAB cells were pre-incubated for approximately 2 hours with ⁵¹Cr (100 μCi) (Amersham Biosciences, Piscataway, N.J.) in fully supplemented IMDM (Invitrogen Life Technologies) containing 15% FBS. The cells were mixed intermittently during the pre-incubation period. Fresh, resting human PBMC were purified from whole blood using Lymphocyte Separation Media (LSM) (ICN Pharmaceuticals, New York, N.Y.). PBMC were combined with labeled BJAB cells (5×10⁴ cells per well of 96 well tissue culture plate) at ratios of 25:1, 50:1, and 100:1. To each combination was added 10 μg/ml of purified 2H7 scFv-llama IgG1, 2H7 scFv-llama IgG2, 2H7 scFv-llama IgG3, Rituximab, or no anti-CD20 antibody. The mixtures were incubated for 6 hours at 37° C. Supernatant from each reaction containing ⁵¹Cr released from lysed cells was collected onto a LumaPlate-96 filter plate (Packard, Meriden, Conn.), which was dried overnight. The amount of ⁵¹Cr was measured by a TopCount NXT plate reader (Packard). FIG. 27 shows that the 2H7 scFv-llama IgG2 fusion protein was the most effective llama fusion protein in mediating ADCC. Each data point represents the average measurement of triplicate wells.

[0574] ADCC activity was affected by the source of effector cells. Llama PBMC were isolated from llama blood (Triple J Farms) using LSM. Llama effector cells were added at the same ratios to BJAB target cells as described for the ADCC assay using human effector cells. The cells were combined with 10 μg/ml of purified 2H7 scFv-llama IgG1, 2H7 scFv-llama IgG2, 2H7 scFv-llama IgG3, Rituximab, or no anti-CD20 antibody. The results are presented in FIG. 28.

### Example 12

### Construction and Characterization of scFv Ig Fusion Proteins Expressed on the Cell Surface

[0575] This Example describes a retroviral transfection system for ectopic surface expression of genetically engineered cell surface receptors composed of scFvs that bind costimulatory receptors. The Example also demonstrates the effector function of these various scFv Ig fusion proteins expressed on the surface of target cells.

[0576] The heavy and light chain variable regions were cloned from murine monoclonal antibodies specific for various costimulatory receptors, and single chain Fv constructs were prepared essentially as described in Example 1. Antibodies included 2H7, anti-human CD20; 40.2.220, anti-human CD40; 2E12, anti-human CD28; 10A8, anti-human CD152 (anti-CTLA-4); and 500A2, anti-murine CD3. The heavy chain and light chain variable regions of each antibody were cloned according to standard methods for cloning immunoglobulin genes and as described in Example 1. Single chain Fv constructs were prepared as described in Example 1 by inserting a nucleotide sequence encoding a (gly₄ser)₃ peptide linker between the V_{L} region nucleotide sequence of 40.2.220, 2E12, 10A8, and 500A2, respectively (SEQ ID NOs:______, respectively) and the V_{H} region nucleotide sequence of 40.2.220, 2E12, 10A8, and 500A2, respectively (SEQ ID NOs:______, respectively). The polypeptide sequence for V_{L} of 40.2.220, 2E12, 10A8, and 500A2 are set forth in SEQ ID NOs:______, respectively, and the polypeptide sequence for V_{H} of 40.2.220, 2E12, 10A8, and 500A2 are set forth in SEQ ID NOs:______, respectively. Each scFv polynucleotide (SEQ ID NOs:______ for 40.2.220, 2E12, 10A8, and 500A2, respectively) was then fused to human IgG1 mutant hinge (CCC→SSS) and mutant CH2 (proline to serine mutation at residue 238 (238 numbering according to EU nomenclature, Ward et al., 1995 Therap. Immunol. 2:77-94; residue 251 according to Kabat et al.) and wild type CH3 domains according to the methods described in Example 5 and 11. Each scFv mutant IgG1 fusion polynucleotide sequence was then fused in frame to sequences encoding the transmembrane domain and cytoplasmic tail of human CD80 (SEQ ID NO:______, such that when the fusion protein was expressed in the transfected cell, CD80 provided an anchor for surface expression of the scFv Ig fusion protein. cDNAs encoding the scFv-IgG-CD80 fusion proteins (SEQ ID NOs:______ for 40.2.220-, 2E12-, 10A8-, and 500A2-scFv-IgG-CD80, respectively) were inserted into the retroviral vector pLNCX (BD Biosciences Clontech, Palo Alto, Calif.) according to standard molecular biology procedures and vendor instructions. The scFv-Ig-CD80 cDNA was inserted between the 5′LTR-neomycin resistance gene-CMV promoter sequences and the 3′LTR sequence. The retroviral constructs were transfected into Reh, an acute lymphocytic leukemia cell line (ATCC CRL-8286). Transfected cells were screened to select clones that were expressing scFv-Ig fusion proteins on the cell surface.

[0577] CDC and ADCC assays were performed with the transfected Reh cells to determine if expression of the scFv-Ig polypeptides on the cell surface augmented effector cell function. Reh cells expressing anti-human CD152 scFv-mutant IgG-CD80 (SEQ ID NO:______; Reh anti-human CD28 scFv-mutant IgG-CD80 (SEQ ID NO:______); Reh anti-human CD28 scFv-mutant IgG-CD80 (SEQ ID NO:______; Reh anti-human CD40 scFv-mutant IgG-CD80 (SEQ ID NO:______); Reh anti-human CD20 scFv-mutant IgG-CD80 (SEQ ID NO:______) were combined with human PBMC (see Example 11) and rabbit complement (10 μg/ml) for one hour at 37° C. Untransfected Reh cells were included as a control. Viability of the cells was determined by trypan blue exclusion, and the percent of killed cells was calculated (see Example 11). FIG. 29 shows the effectiveness of the scFv-IgG-CD80 fusion proteins when expressed on the cell surface of tumor cells to mediate complement dependent cytotoxicity.

[0578] The same transfected Reh cells tested in the CDC assay plus Reh cells transfected with the polynucleotide construct that encodes anti-murine CD3-scFv-Ig-CD80 (SEQ ID NO:______were analyzed for ADCC activity (see Example 11). Untransfected and transfected Reh cells were pre-labeled with ⁵¹Cr (100 μCi) (Amersham) for two hours at 37° C. Human PBMC served as effector cells and were added to the Reh target cells (5×10⁴ cells per well of 96 well plate) at ratios of 5:1, 2.5:1, and 1.25:1. After five hours at 37° C., culture supernatants were harvested and analyzed as described in Example 11. Percent specific killing was calculated according to the following equation: ((experiment release minus spontaneous release)/(maximum release minus spontaneous release))×100. The data are presented in FIG. 30. Each data point represents the average of quadruplicate samples.

[0579] Using the same procedures described above, the same results with other binding domains were obtained using the following monoclonal antibodies monoclonal antibodies as sources of sFv: for CD20, IF5 (Genbank AY 058907 and AY058906); for CD40, 2.36 and G28.5; for CD28, 9.3.

[0580] Cell surface expression of antibody binding domains is accomplished by fusing antibody scFvs to IgA hinge and constant regions and IgE hinge-acting region, i.e., IgE CH2, and constant regions. Polynucleotides encoding an anti-4-1BB scFv, 5B9 (anti-human 4-1BB) scFv, and 2e12 (anti-human CD40) fused to IgAH IgA T4 (four terminal CH3 residues deleted) fused to the CD80 transmembrane and cytoplasmic domains and IgE Fc regions are shown in SEQ ID NOs:______. The encoded polypeptides are shown in SEQ ID NOs:______.

### Example 13

### Construction and Sequence of Human 1g Hinge-CH2-CH3 Mutants and 2H7 Variable Region Mutants

[0581] This Example describes construction of scFv fusion proteins containing mutant human IgG1 and IgA constant regions. This Example also describes construction of a 2H7 scFv mutant with a single point mutation in the variable heavy chain region. Mutations were introduced into variable and constant region domains according to methods described herein and known in the molecular biology arts. FIG. 31 presents nomenclature for the Ig constant region constructs.

[0582] The human IgG1 hinge region of the 2H7 scFv human IgG1 hinge-CH2-CH3 fusion proteins was mutated to substitute cysteine residues that in a whole immunoglobulin are involved in forming disulfide bonds between two heavy chain molecules. One mutant, 2H7 scFv fused to a human IgG1 hinge region in which all three cysteine residues were mutated to serine residues (MTH (SSS)), was prepared as described in Example 5 (designated in Example 5 as CytoxB-MHWTG1C (includes wild type IgG1 CH2 and CH3 domains)) (now referred to as 2H7 scFv MTH (SSS) WTCH2CH3) and comprises the polynucleotide sequence SEQ ID NO:______encoding the polypeptide as set forth in SEQ ID NO______. The polynucleotide sequence encoding this mutant (SEQ ID NO:______) was used as a template to create mutant hinge regions in which the first two cysteine residues were substituted with serine residues (IgG MTH (SSC)). An oligonucleotide was designed to substitute the third serine residue with a cysteine and had the following sequence: 5′-gtt gtt gat cag gag ccc aaa tct tct gac aaa act cac aca tct cca ccg tgc cca gca cct g-3′ (HuIgGMHncs3, SEQ ID NO:______). A second mutant was prepared in which the mutant hinge had serine residues substituting the first and third cysteine residues (IgG MTH (SCS)). The sequence of the oligonucleotide to create this mutant was as follows: 5′-gtt gtt gat cag gag ccc aaa tct tct gac aaa act cac aca tgc cca ccg-3′ (HuIgGMHncs2, SEQ ID NO:______). A third mutant was prepared with cysteine residues substituted at the second and third positions (IgG MTH (CSS)), also using the IgG MTH (SSS) mutant as template, and an oligonucleotide having the sequence, 5′-gtt gtt gat cag gag ccc aaa tct tgt gac aaa act cac-3′ (HuIgGMHncs1, SEQ ID NO:______).

[0583] The oligonucleotides introducing the mutations into the hinge region were combined with template and a 3′ oligonucleotide containing an XbaI site (underlined and italicized) (5′-gtt gtt tct aga tca ttt acc cgg aga cag gga gag gct ctt ctg cgt gta g-3′ (SEQ ID NO:______) to amplify the mutant hinge-wild type (WT)-CH2-CH3 sequences by PCR. The IgG MTH CSS and IgG MTH SCS mutant sequences were amplified for 25 cycles with a denaturation profile of 94° C., annealing at 52° C. for 30 seconds, and extension at 72° C. for 30 seconds. The IgG MTH SSC mutant sequence was amplified under slightly different conditions: denaturation profile of 94° C., annealing at 45° C. for 30 seconds, and extension at 72° C. for 45 seconds. The amplified polynucleotides were inserted into the TOPO® cloning vector (Invitrogen Life Technologies) and then were sequenced as described in Example 1 to confirm the presence of the mutation. pD18 vector containing 2H7 scFv was digested to remove the constant region sequences essentially as described in Example 10. The mutant hinge-wild type CH2-CH3 regions were inserted in frame into the digested vector DNA to obtain vectors comprising 2H7 scFv MTH (CSS) WTCH2CH3 encoding DNA (SEQ ID NO:______); 2H7 scFv MTH (SCS) WTCH2CH3 encoding DNA (SEQ ID NO:______); and 2H7 scFv MTH (SSC) WTCH2CH3 encoding DNA (SEQ ID NO:______.

[0584] A mutation of leucine to serine at position 11 in the first framework region of the heavy chain variable region (numbering according to Kabat et al., Sequences of Proteins of Immunological Interest, 5^{th} ed. Bethesda, Md.: Public Health Service, National Institutes of Health (1991)) was introduced into the 2H7 scFv MTH (SSS) WTCH2CH3 fusion protein (SEQ ID NO:______). The wild type leucine residue was substituted with serine by site-directed mutagenesis using the oligonucleotide Vhser11: 5′-gga ggt ggg agc tet cag gct tat cta cag cag tct ggg get gag teg gtg agg cc-3′ (SEQ ID NO:______). The 3′-primer for PCR was huIgG1-3′ having the sequence 5′-gtc tct aga cta tca ttt acc cgg aga cag-3′ (SEQ ID NO:______) (XbaI site underlined and italicized). After PCR amplification, the fragments were inserted into the TOPO® cloning vector and sequenced to confirm the presence of the VH11 leucine to serine mutation. The 2H7 scFv-IgG MTH (SSS) WTCH2CH3 encoding DNA was shuttled into the PSL1180 cloning vector (Pharmacia Biotech, Inc., Piscataway, N.J.). The construct PSL1180-2H7 scFv-IgG MTH (SSS) WTCH2CH3 was digested with Sac and XbaI to remove the wild type V_{H} domain and the hinge and CH2 and CH3 domains. The PCR product comprising the VH11 mutant was digested with Sac and XbaI and then inserted into the digested PSL 1180 construct according to standard molecular biology procedures. The construct was then digested with Hind III and XbaI, and inserted into the mammalian expression vector pD18 (see methods described in Example 1 and Example 10). The mutant is designated 2H7 scFv VH11SER IgG MTH (SSS) WTCH2CH3 (FIG. 31). The polynucleotide sequence is provided in SEQ ID NO:______, and the encoded polypeptide sequence is provided in SEQ ID NO:______.

[0585] Four constructs containing IgA constant region domains were prepared. One construct contained wild type IgA hinge fused to human IgG1 CH2 and CH3 (IgAH IgG WTCH2CH3) (FIG. 31). Sequential PCR amplifications were performed to substitute the human IgG1 hinge of the 2H7 scFv construct with nucleotide sequences encoding the IgA hinge. The 5′ oligonucleotide primer (hulgA/Gchim5) for the first PCR reaction had the sequence, 5′-cca tct ccc tca act cca cct acc cca tct ccc tca tgc gca cct gaa ctc ctg-3′ (SEQ ID NO:______). The primer (hulgAhg-5′) for the second PCR reaction to add more IgA specific hinge sequence and add a BclI restriction enzyme site (italicized and underlined) had the sequence, 5′-gtt gtt gat cag cca gtt ccc tca act cca cct acc cca tct ccc caa ct-3′ (SEQ ID NO:______). The 3′ primer for both amplification steps was huIgG1-3′ having the sequence, 5′-gtc tct aga cta tca ttt acc cgg aga cag-3′ (SEQ ID NO:______. The sequence of the PCR product was confirmed by TOPO® cloning as described above. The gel-purified fragment was digested with BclI and XbaI and then inserted into the 2H7 scFv-pD 18 vector that had been digested BclI and XbaI to remove all the IgG1 constant region domains. Ligation was performed as described in Example 10 to provide a mammalian expression vector comprising the nucleotide sequence (SEQ ID NO:______) encoding a 2H7 scFv IgA hinge-IgG1 CH2-CH3 polypeptide (SEQ ID NO:______.

[0586] A second pD18 mammalian expression vector was constructed that had a polynucleotide sequence (SEQ ID NO:______) that encoded a 2H7 scFv fused to wild type IgA hinge, CH2, and CH3 domains (SEQ ID NO:______). Human IgA constant regions sequences were obtained by using random primers to reverse transcribe total RNA isolated from human tonsil followed by PCR amplification of the cDNA using sequence specific primers, essentially as described in Example 10. Human IgA hinge-CH2-CH3 nucleotide sequence (SEQ ID NO:______) encoding the IgA-CH2-CH3 polypeptide (IgAH IgACH2CH3, FIG. 31) (SEQ ID NO:______was amplified using the 5′ oligonucleotide hulgAhg-5′ (SEQ ID NO:(same as above______) and a 3′ oligonucleotide hulgA3′ having the sequence, 5′-gtt gtt tct aga tta tca gta gca ggt gcc gtc cac ctc cgc cat gac aac-3′ (SEQ ID NO:______). Secretion of a 2H7-IgA hinge-IgA CH2-CH3 polypeptide from transfected mammalian cells required co-expression of human J chain that covalently binds to two IgA CH3 domains via disulfide bonds. Total RNA was isolated from tonsil B cells and was reversed transcribed to generate cDNA as described above. PCR amplification of the nucleotide sequence encoding the J chain was performed with J chain specific primers. The 5′ PCR primer, HUJCH5nl, had the sequence, 5′-gtt gtt aga tct caa gaa gat gaa agg att gtt ctt-3′ (SEQ ID NO:______), and sequence of the 3′ primer, HUJCH3, was 5′-gtt gtt tct aga tta gtc agg ata gca ggc atc tgg-3′ (SEQ ID NO:______. The cDNA was cloned into TOPO(V for sequencing as described in Example 10. J chain encoding cDNA (SEQ ID NO: was then inserted into pD18 and pCDNA3-Hygro (+) (Invitrogen Life Technology) vectors for co-transfection with 2H7 scFv IgA hinge-CH2-CH3 constructs. The J chain has the predicted amino acid sequence set forth in SEQ ID NO:______.

[0587] Secretion of an scFv IgA constant region construct in the absence of J chain was accomplished by engineering a truncated CH3 domain with a deletion of the four carboxy terminal amino acids (GTCY, SEQ ID NO:______) (IgAH IgA-T4, FIG. 31), which include a cysteine residue that forms a disulfide bond with the J chain. The IgA hinge-CH2-CH3 nucleotide sequence containing the deletion in CH3 (SEQ ID NO: was prepared using a 5′ PCR primer (hulgAhg-5′) having the sequence 5′-gtt gtt gat cag cca gtt ccc tca act cca cct acc cca tct ccc tca act-3′ (SEQ ID NO:______) (BclI site is underlined and italicized), and a 3′ PCR primer (HUIGA3T1) having the sequence 5′-gtt gtt tct aga tta tca gtc cac ctc cgc cat gac aac aga cac-3′ (SEQ ID NO:______). This mutated IgA constant region nucleotide sequence was inserted into a 2H7 scFv pD18 vector as described for the generation of the previous 2H7 scFv-Ig constructs (see Example 1 and this example) that comprises the polynucleotide sequence (SEQ ID NO: encoding a 2H7 IgAH IgA-T4 polynucleotide (SEQ ID NO:______).

[0588] A fourth construct was prepared that encoded a 2H7 scFv-IgA constant region fusion protein with a deletion of 14 additional amino acids, most of which are hydrophobic residues, from the carboxy terminus of IgA CH3. The 2H7 scFv-IgAH IgA-T4 encoding polynucleotide was used as template to engineer a deletion of the nucleotide sequence encoding PTHVNVSVVMAEVD (SEQ ID NO:______). The 5′ oligonucleotide primer had the sequence 5′-gtt gtt eat cag cca gtt ccc tca act cca cct acc cca tct ccc tca act-3′ (SEQ ID NO:______) (BclI site shown as underlined and italicized). The 3′ oligonucleotide sequence was 5′-gtt gtt tct aga tta tca ttt acc cgc caa gcg gtc gat ggt ctt-3′ (SEQ ID NO:______). The deleted IgA CH3 region was amplified by using the above oligonucleotides to amplify the IgA constant region from RNA isolated from human tonsil such that the cDNA contained the deleted carboxyl terminal encoding region for the 18 amino acids. The IgAH IgA-T18 constant region was inserted into a 2H7 scFv pD18 vector that comprises the polynucleotide sequence (SEQ ID NO:______) encoding a 2H7 IgAH IgA-T18 polynucleotide (SEQ ID NO:______) as described above.

### Example 14

### Effector Function of CTLA-4 IgG Fusion Proteins

[0589] The Example compares the effector functions of CTLA-4 Ig fusion proteins in CDC and ADCC assays.

[0590] Two CTLA-4 IgG fusion proteins were constructed. One fusion protein comprises the extracellular domain of CTLA-4 fused to human IgG1 wild type hinge, CH2, and CH3 domains and is designated CTLA-4 IgG WTH (CCC) WTCH2CH3 (SEQ ID NO:______). A pD18 mammalian expression vector comprising a polynucleotide sequence encoding CTLA-4 IgG WTH (CCC) WTCH2CH3 (SEQ ID NO:______) was prepared by fusing in frame the nucleotide sequence encoding the extracellular domain of CTLA-4 (SEQ ID NO:______) (see U.S. Pat. No. 5,844,095) to the nucleotide sequence encoding IgG WTH (CCC) WTCH2CH3 (SEQ ID NO:______) according to the methods described in Examples 1 and 10. The extracellular domain nucleotide sequence also comprises a BclI restriction enzyme site at the 3′ end, and a leader peptide nucleotide sequence (SEQ ID NO:______) that encodes an oncoM leader peptide (SEQ ID NO:______). A second CTLA-4 IgG fusion protein, designated CTLA-4 IgG MTH (SSS) MTCH2WTCH3, contained the extracellular domain of CTLA-4 (plus the oncoM leader peptide sequence) fused to a mutant IgG hinge in which all three cysteine residues were replaced with serine residues. The hinge region was fused to a mutant IgG1 CH2 domain that had a mutation at isotype position 238 (EU numbering, Ward et al., supra, (position 251 using numbering according to Kabat et al., supra; position 209 where numbering commences with first residue of IgG1 CH1; i.e., PAPELLDGPS (SEQ ID NO:______) of wild type IgG1 CH2 is modified to PAPELLDGSS (SEQ ID NO:______)), which was fused to IgG1 wild type CH3 (U.S. Pat. No. 5,844,095). The CTLA-4 IgG MTH (SSS) MTCH2WTCH3 polynucleotide comprises the nucleotide sequence in SEQ ID NO:______ and the deduced amino acid sequence comprises the sequence provided in SEQ ID NO:______. CTLA-4 fusion proteins were also prepared using CTLA-4 extracellular membrane encoding sequences without the leader peptide (SEQ ID NO:______).

[0591] To measure CDC activity, purified CTLA-4 IgG WTH (CCC) WTCH2CH3 (2 μg/ml) or CTLA-4 IgG MTH (SSS) MTCH2WTCH3 (2 μg/ml) was added to Reh cells (see Example 12) and to Reh cells transfected with the costimulatory molecule CD80 such that CD80 was expressed on the cell surface (Reh CD80.10, obtained from Dr. E. Clark, University of Washington, Seattle, Wash.; see Doty et al., 1998 J. Immunol. 161: 2700; Doty et al., 1996 J. Immunol. 157: 3270), in the presence or absence of rabbit complement (10 μg/ml). Purified CTLA Ig fusion proteins were prepared from culture supernatants of transiently transfected COS cells according to methods described in Example 10. The assays were performed essentially as described in Example 11 and 12. The data presented in FIG. 32 show that only CD80-transfected Reh cells were killed in the presence of complement and CTLA-4 IgG WTH (CCC) WTCH2CH3 fusion protein.

[0592] The purified CTLA-4 Ig fusion proteins were also tested in ADCC assays. Human PBMC, serving as effector cells, were added to Reh or Reh CD80.1 target cells at a ratio of 1.25:1, 2.5:1, 5.0:1, and 10:1. Cells were labeled and the assays performed essentially as described in Examples 11 and 12. The results are presented in FIG. 33. Each data point represents the average of four independent culture wells at each effector:target cell ratio. The data show that only CTLA-4 IgG WTH (CCC) WTCH2CH3 mediated significant ADCC of Reh CD80.10 cells.

### Example 15

### Effector Function of CTLA-4 IgA Fusion Proteins

[0593] CTLA-4 IgA fusion proteins are prepared as described for the IgG fusion proteins (see Examples 1, 13, and 14). CTLA-4 extracellular domain nucleotide sequence (SEQ ID NO:______) is fused in open reading frame to nucleotides encoding IgAH IgACH2CH3 (SEQ ID NO:______) to provide the nucleotide sequence (SEQ ID NO:______) encoding a CTLA-4 IgAH IgACH2CH3 fusion protein (SEQ ID NO:______. The fusion protein is transiently expressed in COS cells (see Example 10) or stably expressed in CHO cells (see Example 1). Secretion of the CTLA-4 IgAH IgACH2CH3 fusion protein requires co-transfection with a construct containing a polynucleotide sequence (SEQ ID NO: that encodes human J chain (SEQ ID NO:______). The CTLA-4 IgAH IgACH2CH3 fusion protein is isolated as described in Examples 10 and 14. To express a CTLA-4 IgA construct without the presence of J chain, a CTLA-4 IgAH IgA-T4 construct is prepared and transfected into mammalian cells. In a similar manner as described for the CTLA-4 extracellular fragment fused to wild type IgA hinge-CH2CH3, the CTLA-4 extracellular domain nucleotide sequence (SEQ ID NO:______) is fused in open reading frame to a nucleotide sequence (SEQ ID NO:______) encoding a IgAH IgA-T4 polypeptide (SEQ ID NO:______) to provide a nucleotide sequence comprising SEQ ID NO: encoding a CTLA-4 IgAH IgA-T4 polypeptide (SEQ ID NO:______. Effector function of each construct is evaluated by CDC and ADCC as described in Example 14.

### Example 16

### Binding of Anti-CD20 ScFv Human Ig Fusion Proteins to CHO Cells Expressing CD20

[0594] This Example describes binding of 2H7 scFv Ig fusion proteins to CHO cells that express CD20. The analysis was performed by flow cytometry. Culture supernatants were collected from transiently transfected COS cells expressing 2H7 scFv IgG WTH (CCC) WTCH2CH3 (SEQ ID NO:______); 2H7 scFv IgG MTH (CSS) WTCH2CH3 (SEQ ID NO:______); 2H7 scFv IgG MTH (SCS) WTCH2CH3 (SEQ ID NO:______); and 2H7 scFv VHSER11 WTH WTCH2CH3 (SEQ ID NO:______), and two-fold serial dilutions were prepared. Serial two-fold dilutions of purified 2H7 scFv IgG MTH (SSC) WTCH2CH3 (SEQ ID NO:______) were prepared starting at a concentration of 5 μg/ml. The culture supernatants and purified fusion protein samples were incubated with (CD20+) CHO cells for one hour on ice. The cells were washed twice and then incubated with 1:100 FITC-conjugated goat anti-human IgG (CalTag) for 40 minutes. The unbound conjugate was then removed by washing the cells and flow cytometry analysis was performed using a Coulter Epics XL cell sorter. Results are presented in FIG. 34.

### Example 17

### Immunoblot Analysis of Anti-CD20 scFv Human IgG and IgA Fusion Proteins

[0595] This Example describes immunoblot analysis of 2H7 scFv IgG and 2H7 scFv IgA fusion proteins that were immunoprecipitated from transfected cell culture supernants.

[0596] COS cells were transiently transfected with plasmids comprising nucleotide sequences for 2H7 scFv IgG WTH (CCC) WTCH2CH3 (SEQ ID NO: ); 2H7 scFv IgG MTH (CSS) WTCH2CH3 (SEQ ID NO: ); 2H7 scFv IgG MTH (SCS) WTCH2CH3 (SEQ ID NO: ); 2H7 scFv IgA H IgG WTCH2CH3 (SEQ ID NO: ); and scFv IgG MTH (SSS) WTCH2CH3 (SEQ ID NO: ) essentially according to the method described in Example 10. Cells were also transfected with vector only. After 48-72 hours at 37° C., cell culture supernatants were harvested and combined with protein A-agarose beads (Repligen) for one hour at 4° C. The beads were centrifuged and washed several times in TNEN [20 mM Tris base, 100 mM NaCl, 1 mM EDTA, and 0.05% NP-40, pH 8.0). The immunoprecipitates were combined with 25 μl 2× NuPAGE®t SDS Sample Buffer (Invitrogen Life Technologies) (non-reduced samples). The proteins were fractionated on NuPAGEO® 10% Bis-Tris gels (Invitrogen Life Technologies). After electrophoresis (approximately 1 hour), the proteins were transferred from the gel onto a Immobilon P polyvinylidene fluoride (PVDF) membrane (Millipore, Bedford, Mass.) using a semi-dry blotter (Ellard Instrumentation, Monroe, Wash.). The PVDF membrane was blocked in PBS containing 5% nonfat milk and then probed with HRP-conjugated goat anti-human IgG (Fc specific) (CalTag). After washing the immunoblot several times in PBS, the blot was developed using ECL (Amersham Biosciences). The results are shown in FIG. 35.

### Example 18

### Binding of Anti-CD20 scFv Human IgA Fusion Proteins to CD20+Cho Cells

[0597] This Example describes flow immunocytofluorimetry analysis of binding of 2H7 scFv IgAH IgACH2CH3 (SEQ ID NO:______) and 2H7 scFv IgAH IgAT4 (SEQ ID NO:______) fusion proteins to (CD20+) CHO cells.

[0598] COS cells were transiently co-transfected as described in Example 10 with plasmid DNA comprising a polynucleotide sequence (SEQ ID NO:______) encoding 2H7 scFv IgAH IgACH2CH3 polypeptide (SEQ ID NO:______) and with a separate plasmid comprising a polynucleotide sequence (SEQ ID NO:______) encoding a human J chain polypeptide (SEQ ID NO:______). COS cells were also transfected with a polynucleotide sequence (SEQ ID NO:______) encoding a 2H7 scFv IgA fusion protein that had a deletion of four amino acids at the carboxy terminus of CH3 (2H7 scFv IgAH IgA-T4, SEQ ID NO:______). The transfections were performed as described in Example 10, Culture supernatants from transfected COS cells were combined with (CD20+) CHO cells (see Example 1) and incubated for one hour on ice. The cells were washed twice with PBS-2% FBS and then combined with FITC-conjugated goat anti-human IgA chain (CalTag) (1:100) for 40 minutes. The cells were again washed and then analyzed by flow cytometry using a Coulter Epics XL cell sorter. FIG. 36 shows that co-transfection with J chain was not required for secretion of 2H7 scFv IgAH IgAT4, the 2H7 IgA fusion protein with the truncated CH3 carboxy end (SEQ ID NO:______).

### Example 19

### Effector Function of Anti-CD20 scFv Human IgA Fusion Proteins

[0599] This Example illustrates ADCC activity of 2H7 IgG and IgA fusion proteins against cells that express CD20. BJAB cells were prelabeled with ⁵¹Cr (100 μCi) (Amersham) for two hours at 37° C. Effector cells were obtained from fresh, resting human whole blood, which was diluted in an equal volume of Alsever's solution to prevent coagulation. 2H7 scFv IgG MTH (SSS) WTCH2CH3 (SEQ ID NO:______); 2H7 scFv IgG MTH (SCS) WTCH2CH3 (SEQ ID NO:______); 2H7 scFv IgG WTH (CCC) WTCH2CH3 (SEQ ID NO:______); and 2H7 scFv IgAH IgACH2CH3 (SEQ ID NO:______) fusion proteins were purified from transiently transfected COS cell supernatants (100-200 ml) by protein A chromatography as described in Example 10. COS cells transfected with the plasmid encoding 2H7 scFv IgAH IgACH2CH3 were co-transfected with a plasmid encoding human J chain as described in Example 18. Two-fold serial dilutions of the purified 2H7 Ig fusion proteins starting at 5 μg/ml were added to the labeled BJAB cells (5×10⁴ cells per well of 96 well tissue culture plate) in the presence of whole blood (100 μL of whole blood diluted 1:1 in Alsever's solution, final dilution 1:4) and incubated for five hours at 37° C. Culture supernatants were harvested and analyzed as described in Example 1. Percent specific killing was calculated according to the following equation: ((experiment release minus spontaneous release)/(maximum release minus spontaneous release))×100. The data are presented in FIG. 37. Each data point represents the average of quadruplicate samples.

[0600] In a second ADCC assay, the number of labeled BJAB target cells was held constant in each sample, and whole blood was added at dilutions of 0.25, 0.125, and 0.0625. Purified 2H7 IgG and IgA fusion proteins were added at a concentration of 5 μg/ml. The BJAB cells, whole blood, and fusion proteins were incubated, the supernatants harvested, and the percent specific killing was calculated as described above. Percent specific killing for each of the 2H7 fusion proteins is presented in FIG. 38.

[0601] The ADCC activity of purified 2H7 scFv IgG MTH (SSS) WTCH2CH3 (5 μg/ml) and of purified 2H7 scFv IgAH IgACH2CH3 (5 μg/ml) was compared in the presence of different effector cell populations. PBMC were isolated from whole blood as described in Examples 11 and 12. PBMC were combined with labeled BJAB target cells (5×10⁴ per well of 96 well tissue culture plate) at ratios of 50:1, 25:1, and 12.5:1. The assay was performed and the data analyzed as described above. FIG. 39A shows that only the 2H7 scFv IgG MTH (SSS) WTCH2CH3 fusion protein had ADCC activity when PBMC served as the effector cells. FIG. 39B shows that both 2H7 scFv IgG MTH (SSS) WTCH2CH3 and 2H7 scFv IgAH IgACH2CH3 exhibit ADCC activity when whole blood was the source of effector cells (as illustrated in FIG. 38).

### Example 20

### Expression Level of 2H7 scFv Vh11Ser IgG MTH (SSS) WTCH2CH3 Fusion Protein

[0602] This Example compares the expression level of 2H7 scFv VH11Ser IgG MTH (SSS) WTCH2CH3 fusion protein (SEQ ID NO:______) with other 2H7 scFv IgG constructs that do not contain the mutation in the variable heavy chain domain. The mammalian expression vector pD 18 comprising nucleotide sequences 2H7 scFv IgG MTH (SSS) WTCH2CH3 (SEQ ID NO: ); 2H7 scFv IgG MTH (CSS) WTCH2CH3 (SEQ ID NO: ); 2H7 scFv IgG MTH (SCS) WTCH2CH3 (SEQ ID NO: ); 2H7 scFv IgG WTH (CCC) WTCH2CH3 (SEQ ID NO: ); and 2H7 scFv VHSER11 IgG MTH (SSS) WTCH2CH3 (see Examples 1 and 13) were transiently transfected into COS cells as described in Example 10. After 72 hours at 37° C., culture supernatants were harvested, and 1 μl of each supernatant was combined with non-reducing sample buffer (see method described in Example 10). The culture supernatant samples and aliquots of purified 2H7 scFv IgG MTH (SSS) WTCH2CH3 (40 ng, 20 ng, 10 ng/5 ng, and 2.5 ng) were fractionated on 10% Bis-Tris (MOPS) NuPAGE® gels (Invitrogen Life Technologies). Multimark®& protein standards (Invitrogen Life Technologies) were also separated on the gel. The proteins were transferred to a PDVF membrane and immunoblotted as described in Example 17. The immunoblot is presented in FIG. 40. The amounts of the fusion proteins were quantified by densitometry analysis of the blots using the ScionImage for Windows software and comparison with the standard curve. The 2H7 scFv IgG WTH (CCC) WTCH2CH3 construct produced approximately 12 ng/ul or 12 micrograms/ml, the 2H7 scFv IgG MTH (CSS) WTCH2CH3 produced approximately 10 ng/ul or 10 micrograms/ml, the 2H7 scFv IgG MTH (SCS) WTCH2CH3 construct produced approximately 1 ng/ul or 1 microgram/ml, and the 2H7 scFv VHSER11 IgG MTH (SSS) WTCH2CH3 construct produced approximately 30 ng/ml or 30 micrograms/ml.

### Example 21

### Construction of a 2H7 scFv IgG Fusion Protein with a Mutant CH3 Domain

[0603] Amino acid mutations were introduced into the CH3 domain of a 2H7 IgG fusion protein. The pD18 vector comprising 2H7 scFv IgG MTH (SSS) WTCH2CH3 (SEQ ID NO:______) was digested with BclI and XbaI to remove the MTH WTCH2CH3 (SEQ ID NO:______) fragment, which was then subcloned into pShuttle vector (BD Biosciences Clontech, Palo Alto, Calif.) that was double-digested with BclI and XbaI. Subcloning was performed in a kanamycin resistant vector because the ampicillin resistance gene has an XmnI site, which is required for this cloning procedure. Five constructs were prepared with the following substitutions: (1) a phenylalanine residue at position 405 (numbering according to Kabat et al. supra) was substituted with tyrosine using the oligonucleotide CH3Y405; (2) the phenylalanine position at 405 was substituted with an alanine residue using the oligonucleotide CH3A405; (3) the tyrosine residue at position 407 was substituted with an alanine using the oligonucleotide CH3A407; (4) both wild type amino acids at positions 405 and 407 were substituted with tyrosine and alanine, respectively using the oligonucleotide CH3Y405a407; and (5) both wild type amino acids at positions 405 and 407 were substituted with alanine using the oligonucleotide CH3A405a407. The oligonucleotides were the 3′ primers for PCR amplification of a portion of the CH3 domain. The nucleotide sequences for each 3′ oligonucleotide were as follows.

| | | |
|---|---|---|
| CH3Y405: | 5′-gtt gtt gaa gac | (SEQ ID NO: _{——}) |
| | gtt ccc ctg ctg cca | |
| | cct gct ctt gtc cac | |
| | ggt gag ctt gct gta | |
| | gag gta gaa gga | |
| | gcc-3′ | |
| CH3A405: | 5′-gtt gtt gaa gac | (SEQ ID NO: _{——}) |
| | gtt ccc ctg ctg cca | |
| | cct gct ctt gtc cac | |
| | ggt gag ctt gct gta | |
| | gag ggc gaa gga | |
| | gcc-3′ | |
| CH3A407: | 5′-gtt gtt gaa gac | (SEQ ID NO: _{——}) |
| | gtt ccc ctg ctg cca | |
| | cct gct ctt gtc cac | |
| | ggt gag ctt gct ggc | |
| | gag gaa gaa gga | |
| | gcc-3′ | |
| CH3Y405A407: | 5′-gtt gtt gaa gac | (SEQ ID NO: _{——}) |
| | gtt ccc ctg ctg cca | |
| | cct gct ctt gtc cac | |
| | ggt gag ctt gct ggc | |
| | gag gta gaa gga | |
| | gcc-3′ | |
| CH3A405A407: | 5′-gtt gtt gaa gac | (SEQ ID NO: _{——}) |
| | gtt ccc ctg ctg cca | |
| | cct gct ctt gtc cac | |
| | ggt gag ctt gct ggc | |
| | gag ggc gaa gga | |
| | gcc-3′ | |

[0604] The template was the mutant hinge MHWTCH2CH3 human IgG1. The 5′ PCR oligonucleotide primer was huIgGMHWC, [SEQ ID NO:______]. The amplified products were TOPO® cloned and sequenced as described in Examples 1 and 10. DNA from the clones with the correct sequence was digested with BclI and XmnI and transferred to pShuttle containing the MTH WTCH2CH3 sequence, which was also digested with the same restriction enzymes. The mutated IgG sequences were then removed by digestion with Bcll and XbaI and inserted into a pD18 vector containing 2H7 scFv that was also digested with BclI and XbaI. The polynucleotide sequences for mutated the CH3 domains, MTCH3 Y405, MTCH3 A405, MTCH3 A407, MTCH3 Y405a407, and MTCH3 A405a407 are shown in SEQ ID NOs: ______, respectively, and the polypeptide sequences for each are shown in SEQ ID NOs:______, respectively. The polynucleotide sequences for the 2H7 scFv MTH WTCH2 MTCH3 Y405, 2H7 scFv MTH WTCH2 MTCH3 A405, scFv MTH WTCH2 MTCH3 A407, scFv MTH WTCH2 MTCH3 Y405a407, and scFv MTH WTCH2 MTCH3 A405a407, respectively, and the deduced amino acid sequences are shown in SEQ ID NOs:______, respectively.

### Example 22

### Construction of 2H7 scFv IgG Fusion Proteins with Hinge Mutations

[0605] A 2H7 scFv IgG fusion protein was constructed with the third cysteine residue in the IgG1 hinge region substituted with a serine residue. The template for introduction of the mutations was a polynucleotide encoding 2H7 scFv WTH WTCH2CH3 (SEQ ID NO:______). The oligonucleotide introducing the mutations was a 5′ PCR primer oligonucleotide HIgGMHcys3 having the sequence 5′-gtt gtt gat cag gag ccc aaa tct tgt gac aaa act cac aca tgt cca ccg tcc cca gca cct-3′. The oligonucleotide introducing the mutation into the hinge region was combined with template and a 3′ oligonucleotide containing an XbaI site (underlined and italicized) (5′-gtt gtt tct aaa tca ttt acc cgg aga cag gga gag gct ctt ctg cgt gta g-3′ (SEQ ID NO:______)) to amplify the mutant hinge-wild type (WT)-CH2-CH3 sequences by PCR. The IgG MTH CCS mutant sequence was amplified for 30 cycles with a denaturation profile of 94° C., annealing at 50° C. for 30 seconds, and extension at 72° C. for 30 seconds. The amplified polynucleotides were inserted into the TOPO® cloning vector (Invitrogen Life Technologies) and then were sequenced as described in Example 1 to confirm the presence of the mutation. pD18 vector containing 2H7 scFv was digested to remove the constant region sequences essentially as described in Example 10. The mutant hinge-wild type CH2-CH3 regions were inserted in frame into the digested vector DNA to obtain vectors comprising 2H7 scFv MTH (CCS) WTCH2CH3 encoding DNA (SEQ ID NO:______). The deduced polypeptide sequence is shown in SEQ ID NO:______.

### Example 23

### Construction of Anti-CD20 IgE Fusion Proteins

[0606] A binding domain is fused to IgE constant region sequences such that the expressed polypeptide is capable of inducing an allergic response mechanism. The single chain Fv nucleotide sequence of 40.2.220 (SEQ ID NO:______), an anti-CD40 antibody, is fused to IgE CH2—CH3-CH4 according to methods described for other scFv immunoglobulin constant region constructs (see Examples 1, 5, 10, and 13). To PCR amplify the IgE CH2-CH3-CH4 domains, a 5′ oligonucleotide primer, hIgE5Bcl, having the sequence 5′-gtt gtt gat cac gtc tgc tcc agg gac ttc acc cc-3′, and a 3′ oligonucleotide primer, hIgE3stop, having the sequence 5′-gtt gtt tct aga tta act ttt acc ggg att tac aga cac cgc tcg ctg g-3′ are used.

[0607] The retroviral transfection system for ectopic surface expression of genetically engineered cell surface receptors composed of scFvs that bind costimulatory receptors described in Example 12 is used to construct a 40.2.220 scFv IgE-CD80 fusion protein. The 40.2.220 scFv IgE fusion polynucleotide sequence is fused in frame to sequences encoding the transmembrane domain and cytoplasmic tail of human CD80 (SEQ ID NO:______), such that when the fusion protein is expressed in the transfected cell, CD80 provided an anchor for surface expression of the scFv Ig fusion protein. cDNA encoding the anti-CD40 scFv-IgE-CD80 fusion proteins (SEQ ID NO:______) is inserted into the retroviral vector pLNCX (BD Biosciences Clontech) according to standard molecular biology procedures and vendor instructions. The 40.2.220 scFv-Ig-CD80 cDNA is inserted between the 5′LTR-neomycin resistance gene-CMV promoter sequences and the 3′LTR sequence. The retroviral constructs are transfected into a carcinoma cell line, and transfected cells are screened to select clones that are expressing the 40.2.220 scFv-Ig-CD80 fusion protein on the cell surface.

### Example 24

### Construction of IgA-T4 Mutants that are Expressed on the Cell Surface

[0608] The retroviral transfection system for ectopic surface expression of genetically engineered cell surface receptors composed of scFvs that bind costimulatory receptors described in Example 12 is used to construct a 2H7 scFv IgA hinge IgA-T4-CD80 fusion protein. The 2H7 scFv IgAH IgA-T4 fusion polynucleotide sequence (SEQ ID NO:______) is fused in frame to sequences encoding the transmembrane domain and cytoplasmic tail of human CD80 (SEQ ID NO:______), such that when the fusion protein is expressed in the transfected cell, CD80 provided an anchor for surface expression of the scFv Ig fusion protein. cDNA encoding the 2H7 scFv IgAH IgA-T4-CD80 fusion protein (SEQ ID NO:______) is inserted into the retroviral vector pLNCX (BD Biosciences Clontech) according to standard molecular biology procedures and vendor instructions. The 2H7 scFv IgAH IgA-T4-CD80 cDNA is inserted between the 5′LTR-neomycin resistance gene-CMV promoter sequences and the 3′LTR sequence. The retroviral construct is transfected into Reh, an acute lymphocytic leukemia cell line (ATCC CRL-8286). Transfected cells are screened to select clones that are expressing 2H7 scFv-Ig fusion proteins on the cell surface.

### Example 25

### Characterization of an Anti-4-1BB scFv Ig-CD80 Fusion Protein Expressed on the Cell Surface of Tumor Cells and Growth of the Tumor Cells In Vivo

[0609] This example describes construction of an anti-murine 4-1 BB (CD 137) scFv fusion protein that has an IgG wild type hinge and CH2 and CH3 domains that is fused to the CD80 transmembrane and cytoplasmic domains. The Example also illustrates the effect of the cell surface expression of the anti-4-1BB scFv IgG CD80 polypeptide when the transfected tumor cells are transplanted into mice.

[0610] The heavy and light chain variable regions of a rat anti-4-1BB (CD137) monoclonal antibody (1D8) were cloned, and a single chain Fv construct was prepared essentially as described in Example 1. The heavy chain and light chain variable regions of each antibody were cloned according to standard methods for cloning immunoglobulin genes and as described in Example 1. Aingle chain Fv construct was prepared as described in Example 1 by inserting a nucleotide sequence encoding a (gly₄ser)₃ peptide linker between the V_{L} region nucleotide sequence of 1D8 (SEQ ID NO:______) and the V_{H} region nucleotide sequence of 1D8 (SEQ ID NO:______). The polypeptide sequence for 1D8 V_{L} is shown in SEQ ID NO:______, and the polypeptide sequence for the V_{H} domain is shown in SEQ ID NO: . The scFv polynucleotide (SEQ ID NO:______) was then fused to human IgG1 wild-type hinge-CH2-CH3 domains according to the methods described in Example 1. The scFv IgG1 fusion polynucleotide sequence was then fused in frame to sequences encoding the transmembrane domain and cytoplasmic tail of human CD80 (SEQ ID NO:______) essentially as described in Example 12, such that when the fusion protein was expressed in the transfected cell, CD80 provided an anchor for surface expression of the scFv Ig fusion protein. cDNA encoding the scFv-IgG-CD80 fusion protein (SEQ ID NO:______) was inserted into the retroviral vector pLNCX (BD Biosciences Clontech) according to standard molecular biology procedures and vendor instructions. The scFv-Ig-CD80 cDNA was inserted between the 5′LTR-neomycin resistance gene-CMV promoter sequences and the 3′LTR sequence.

[0611] The retroviral constructs were transfected into the metastatic M2 clone of K1735, a melanoma cell line, provided by Dr. I. Hellstrom, PNRI, Seattle, Wash. Transfected cells were screened to select clones that were expressing scFv-Ig fusion proteins on the cell surface. To demonstrate that the 1D8 scFv IgG-CD80 construct was expressed on the cell surface of the tumor cells, the transfected cells were analyzed by flow immunocytofluorimetry. Transfected cells (K1735-1D8) were incubated for one hour on ice in phycoerythrin-conjugated F(ab′)₂ goat anti-human IgG. The unbound conjugate was then removed by washing the cells and flow cytometry analysis was performed using a Coulter Epics XL cell sorter. Results are presented in FIG. 41A.

[0612] The growth of K1735-1D8 transfected cells was examined in vivo. K1735-WT cells grew progressively when transplanted subcutaneously (s.c.) in naive C3H mice. Although the same dose of K1735-1D8 cells initially formed tumors of an approximately 30 mm² surface area, the tumors started to regress around day 7 and had disappeared by day 20 as shown in FIG. 41B. Tumor cells that were transfected with a similarly constructed vector encoding a non-binding scFv, a human anti-CD28 scFv construct, grew as well as tumor cells that had not been transfected. The presence of a foreign protein, that is, human IgG1 constant domains or rat variable regions, did not make transfected K1735-WT cells immunogenic; the growth of the K1735-1D8 cells in C3H mice was identical to that of K1735-WT cells (untransfected).

[0613] To investigate the roles of CD4⁺ and CD8⁺ T lymphocytes and NK cells in the regression of K1735-1D8 tumors, naive mice were injected intraperitoneally (i.p.) with monoclonal antibodies (monoclonal antibodies, typically 50 μg in a volume 0.1 ml) to remove CD8⁺, CD4⁺ or both CD4⁺ and CD8⁺ T cells, or were injected with anti-asialo-GMI rabbit antibodies to remove NK cells. Twelve days later, when flow cytometry analysis of spleen cells from identically treated mice showed that the targeted T cell populations were depleted, K1735-1D8 cells were transplanted s.c to each T cell-depleted group. K1735-1D8 had similar growth kinetics in mice that had been injected with the anti-CD8 MAb or control rat IgG while removal of CD4⁺ T cells resulted in the growth of K1735-1D8 with the same kinetics as K1735-WT. This failure to inhibit tumor growth after CD4+ T cell removal was observed regardless of the presence or absence of CD8+ T cells. K1735-1D8 grew in all NK-depleted mice, although more slowly than in the CD4-depleted group. The results are presented in FIG. 41C.

### Example 26

### Therapeutic Effect of Tumor Cells Expressing Anti-4-1BB scFv IgG-CD80 Fusion Protein

[0614] This Example examines the ability of K1735-1D8 transfected tumor cells expressing an anti-CD137 scFv on the cell surface to generate a sufficient immune response in mice to mediate rejection of established, untransfected wild type tumors. C3H mice were transplanted with K1735-WT tumors (2×10⁶ cells/animal) and grown for approximately six days. Experiments were performed using mice with established K1735-WT tumors of 30 mm² surface area. Mice were vaccinated by s.c. injection of K1735-1D8 or irradiated K1735-WT cells on the contralateral side. Identical injections were repeated at the time points indicated in FIG. 42. One group of animals was given four weekly injections of K1735-1D8 cells. According to the same schedule, another group was given irradiated (12,000 rads) K1735-WT cells, and a third group was injected with PBS. The data are plotted in FIG. 42. The WT tumors grew progressively in all control mice and in all mice that received irradiated K1735-WT cells. In contrast, the tumors regressed in 4 of the 5 mice treated by immunization with K1735-1D8. The animals remained tumor-free and without signs of toxicity when the experiment was terminated 3 months later. In the fifth mouse, the tumor nodule decreased in size as long as the mouse received K1735-1D8 cells, but the tumor grew back after therapy was terminated.

[0615] In another experiment with 5 mice/group, mice were injected intravenously (i.v.) with 3×10⁵ K1735-WT cells to initiate lung metastases. Three days later, K1735-1D8 cells were transplanted s.c. This procedure was repeated once weekly for a month; control mice were injected with PBS. The experiment was terminated when one mouse in the control group died, 37 days after receiving the K1735-WT cells. At that time, lungs of the control mice each had >500 metastatic foci. In contrast, less than 10 metastatic foci were present in the lungs of the immunized mice.

[0616] In a third experiment, mixtures of K1735-WT cells and K1735-1D8 cells were injected into immunocompetent syngeneic C3H mice. Mice were injected subcutaneously with K7135-WT cells alone or with a mixture of 2×10⁶ K1735-WT cells and 2×10⁵ K1735-1D8 cells. Tumor growth was monitored at 5-day intervals.

### Example 27

### Expression of Anti-4-1BB scFv IgG-CD80 Fusion Protein on the Cell Surface of Sarcoma Cells

[0617] This Example demonstrates expression of an anti-CD137 scFv on the cell surface of a second type of tumor cell by transfecting a murine sarcoma cell line with an anti-CD137 scFv IgG-CD80 construct.

[0618] The 1D8 scFv IgG WTH WTCH2CH3—CD80 polynucleotide (SEQ ID NO:______) was transferred from the pLNCX vector into pcDNA3-hygro vector using restriction enzyme digestion and ligation steps according to standard molecular biology methods. The constuct was cut with HindIII+Cla1 and thesFv fragment was filled in with Klenow (Roche) and the blunt-ended fragment was ligated into EcoR5 site of pcDNA3. Ag104 murine sarcoma tumor cells were transfected with the pCDNA3-hygro vector containing the 1D8 scFv IgG CD80 fusion protein. Hygromycin-resistant clones were screened by flow cytometry using a FITC anti-human IgG antibody to detect expression of the transgene. Only approximately 15% of the resistant clones had detectable fusion protein initially. Positive cells identified by flow cytometry were repeatedly panned on flasks coated with immobilized anti-human IgG (10 μg/ml) according to standard methods. Panning was performed by incubating cells on the coated plates for 30 min at 37C; the plates were then washed 2-3× in versene or PBS. After each round, cells were tested for IgG expression by FACS. The histogram in FIG. 44 shows the staining pattern after four rounds of panning against anti-human IgG (black). Untransfected cells were stained and are indicated in gray. All of the cells in the population were positive.

### Example 28

### Construction and Characterization of a Bispecific scFv Ig Fusion Protein and scFv Ig Fusion Proteins with a Mutation in the IgG1 CH2 Domain

[0619] An anti-CD20 (2H7) scFv IgG fusion protein was constructed that had a mutant hinge (MT (SSS)) and a mutant CH2 domain in which the proline at residue (position number 238 according to Ward et al., supra) was substituted with a serine. The 2H7 scFv IgG MTH (S SS) MTCH2WTCH3 encoding polynucleotide (SEQ ID NO:______) was constructed essentially according to methods described in Examples 1, 5, and 13. The IgG mutant hinge-mutant CH2-wild type CH3 domains were also fused to an anti-CD20 (2H7)— anti-CD40 (40.2.220) bispecific scFv. The anti-CD20-anti-CD40 scFv IgG MTH (SSS) MTCH2WTCH3 encoding polynucleotide sequence is shown in SEQ ID NO: and the encoded polypeptide is shown in SEQ ID NO:______.

[0620] COS cells were transiently transfected with vectors comprising the polynucleotide sequences encoding 2H7 scFv IgG MTH (SSS) MTCH2WTCH3 (SEQ ID NO:______); anti-CD20-anti-CD40 scFv IgG MTH (SSS) MTCH2WTCH3 (SEQ ID NO:______); 2H7 scFv IgG MTH (SSS) WTCH2CH3 (SEQ ID NO:______); and 2H7 scFv IgAH IgG WTCH2CH3 (SEQ ID NO:______as described in Example 10. Culture supernatants were collected and the fusion proteins were purified by protein A chromatography (see Example 10). The purified polypeptides were fractionated by SDS-PAGE according to the method described in Example 10. Rituximab (anti-CD20 monoclonal antibody), and Bio-Rad prestained molecular weight standards (Bio-Rad, Hercules, Calif.), and Multimark® molecular weight standards (Invitrogen Life Technologies were also applied to the gel. The results are presented in FIG. 45.

[0621] The 2H7 scFv Ig fusion protein that contains a mutation in the CH2 domain was compared to fusion proteins that have the wild type CH2 domain in an ADCC assay. The assays were performed essentially as described in Examples 11 and 19. Fresh resting PBMC (effector cells) were added to ⁵¹Cr-labeled BJAB cells (target cells) at the ratios indicated in FIG. 46. Purified 2H7 scFv IgG MTH (55S) MTCH2WTCH3, 2H7 scFv IgG MTH (SSS) WTCH2CH3, 2H7 scFv IgAH IgG WTCH2CH3, and Rituximab, each at 10 μg/ml were added to the effector/target cell mixtures and incubated for five hours at 37° C. Supernatants were harvested and the amount of chromium released was determined as described in Examples 1 and 19. Percent specific killing by each fusion protein is presented in FIG. 46.

### Example 29

### Tumor Cell Surface Expression of an Anti-Human CD3 scFv IgG Fusion Protein

[0622] An anti-human CD3 scFv Ig CD80 fusion protein was prepared essentially as described in Examples 1 and 12. The fusion protein comprised an anti-human CD3 scFv fused to wild type IgG1 hinge (SEQ ID NO:______) and wild type CH2 (SEQ ID NO:______) and CH3 (SEQ ID NO:______) domains, fused to CD80 transmembrane and cytoplasmic domains (SEQ ID NO:______) to enable cell surface expression of the anti-CD3 scFv. The anti-human CD3 scFv IgG WTH WTCH2CH3—CD80 polynucleotide (SEQ ID NO:______) encoding the polypeptide (SEQ ID NO:______) was transfected in Reh cells and into T51 cells (lymphoblastoid cell line). Expression of the anti-human CD3 scFv IgG fusion protein was detected by flow cytometry using FITC conjugated goat anti-human IgG (see methods in Examples 4, 10, 16, 18). FIG. 47A illustrates expression of the anti-human CD3 fusion protein on the cell surface of Reh cells, and FIG. 47B shows expression of the fusion protein on T41 cells.

[0623] ADCC assays were performed with the transfected Reh and T51 cells to determine if expression of the scFv-Ig polypeptides on the cell surface augmented effector cell function. Untransfected and transfected Reh cells and untransfected and transfected T51 cells were pre-labeled with ⁵¹Cr (100 μCi) (Amersham) for two hours at 37° C. Human PBMC served as effector cells and were added to the target cells (5×10⁴ cells per well of 96 well plate) at ratios of 20:1, 10:1, 5:1, and 2.5:1. After four hours at 37° C., culture supernatants were harvested and analyzed as described in Examples 11 and 12. Percent specific killing was calculated as described in Example 12. The results are presented in FIG. 48.

### Example 30

### Induction of Cytokine Expression in Tumor Cells Expressing Anti-CD28 scFv on the Cell Surface

[0624] This Example describes the effect of cell surface expressed scFv on cytokine mRNA induction in stimulated lymphocytes co-cultured with tumor cells transfected with an anti-human CD28 scFv IgG-CD80 fusion protein.

[0625] Real time PCR analysis was performed on RNA samples from human PBMC stimulated with Reh, Reh-anti-CD28 (2e12) (see Example 12 for construction of 2e12 scFv IgG WTH WHTCH3CH2-CD80 and transfection of Reh cells), and Reh-CD80 (see Example 14) in order to measure the effects of the surface expressed scFv on cytokine production by the PBMC effector cells. For the real-time PCR assay, SYBR Green (QIAGEN) (Morrison et al., Biotechniques 24: 954-8, 960, 962 (1998)) was used and measured by an ABI PRISM® 7000 Sequence Detection System (Applied Biosystems, Foster City, Calif.) that measures the formation of PCR product after each amplification cycle. Cells were harvested from cultures and total RNA prepared using QIAGEN RNA kits, including a QIA shredder column purification system to homogenize cell lysates, and RNeasy® mini-columns for purification of RNA. cDNA was reverse transcribed using equal amounts of RNA from each cell type and Superscript II Reverse Transcriptase (Life Technologies). SYBR Green real-time PCR analysis was then performed using the prepared cDNA as template and primer pairs specific for cytokine gene products. The average length of the PCR products that were amplified ranged from 150-250 base pairs. The cDNA levels for many activation response molecules including IFNγ, TNFα, GM-CSF, IL-4, IL-5, IL-6, IL-8, IL-10, IL-12, IL-15, ICOSL, CD80 and CD86 were assayed. Control reference cDNAs for constitutively expressed genes, including GAPDH, β-actin, and CD3□E were measured in each assay. The most significant induction of specific mRNA was observed for IFN-γ, and more modest induction was observed for CTLA-4 and ICOS.

### Example 31

### Cloning of an Anti-Human 4-1BB Antibody and Construction of an Anti-Human 4-1bb scFv (Ig Fusion Protein

[0626] A hybridoma cell line expressing a mouse anti-human monoclonal antibody (designated 5B9) was obtained from Dr. Robert Mittler, Emory University Vaccine Center, Atlanta, Ga. The variable heavy and light chain regions were cloned according to known methods for cloning of immunoglobulin genes and as described herein. Cells were grown in IMDM/15% FBS (Invitrogen Life Technologies) media for several days. Cells in logarithmic growth were harvested from cultures and total RNA prepared using QIAGEN RNA kits, including a QIA shredder column purification system to homogenize cell lysates, and RNeasy® mini-columns for purification of RNA according to manufacturer's instructions. cDNA was reverse transcribed using random hexamer primers and Superscript II Reverse Transcriptase (Invitrogen Life Technologies).

[0627] cDNA was anchor-tailed using terminal transferase and dGTP. PCR was then performed using an anchor-tail complementary primer and a primer that annealed specifically to the antisense strand of the constant region of either mouse Ck (for amplifcation of VL) or the appropriate isotype mouse CH1 (for amplification of VH). The amplified variable region fragments were TOPO® cloned (Invitrogen Life Technologies), and clones with inserts of the correct size were then sequenced. Consensus sequence for each variable domain was determined from sequence of at least four independent clones. The 5B9 V_{L} and V_{H} polynucleotide sequences are shown in SEQ ID NOs:______ and ______, respectively, and the deduced amino acid sequences are shown in SEQ ID NOs:______ and ______. The scFv was constructed by a sewing PCR method using overlapping primers containing a synthetic (gly₄ser)₃ linker domain inserted between the light and heavy chain variable regions (see Example 1). The 5B9 scFv polypeptide (SEQ ID NO:______) is encoded by the polynucleotide sequence comprising SEQ ID NO:______.

[0628] 5B9 scFv polynucleotide sequence was fused in frame to the polynucleotide sequence encoding the human IgG1 mutant hinge and wild type CH2 and CH3 (MTH (SSS) WTCH2CH3, SEQ ID NO:______) according to methods described in Examples 5, 10, and 13. COS cells were transiently transfected with a vector comprising the 5B9 scFv IgG MTH (SSS) WTCH2CH3 polynucleotide sequence (SEQ ID NO:______). Supernatant was collected and binding of the 5B9 scFv IgG MTH (SSS) WTCH2CH3 polypeptide (SEQ ID NO: was measured by flow immunocytofluorimetry essentially as described in Examples 4, 10, 16, and 18. Culture supernatant from the 5B9 hybridoma cell line was also included in the binding assay. Fresh human PBMC were incubated in the presence of immobilized anti-CD3 for four days prior to the binding experiment to induce expression of CD137 on the surface of activated T cells. Stimulated PBMC were washed and incubated with COS or hybridoma culture supernatant containing the 5B9 scFv IgG fusion protein or 5B9 murine monoclonal antibody, respectively, for 1 hour on ice. Binding of 5B9 scFv IgG fusion protein or 5B9 murine monoclonal antibody was detected with FITC conjugated anti-human IgG or anti-mouse IgG, respectively. The results are presented in FIG. 49.

### Example 32

### Construction of 2H7 scFv IgG Fusion Proteins with Hinge Mutations

[0629] A 2H7 scFv IgG fusion proteins are constructed with the first cysteine residue and the second cystein in the IgG1 hinge region substituted with a serine residue to provide MTH (SCC) and MTH (CSC). The template for introduction of the mutations is a polynucleotide encoding 2H7 scFv WTH WTCH2CH3 (SEQ ID NO:______). The oligonucleotide introducing the mutations are 5′ PCR primer oligonucleotides HIgGMHcys1 (SEQ ID NO:______) and HIgGMHcys2 (SEQ ID NO:______). The constructs are prepared as described in SEQ ID NO:______). The encoding polynucleotides of the mutants are presented in SEQ ID NOs:______) and the polypeptide sequences are provided in SEQ ID NO:______).

### Example 33

### Construction of 2H7 V_{H}L11S scFv (SSS-S)H WCH2 WCH3

[0630] A change from leucine to serine at position 11 in the heavy chain variable region (numbering according to Kabat et al., Sequences of Proteins of Immunological Interest, 5^{th} ed. Bethesda, Md.: Public Health Service, National Institutes of Health (1991)) was introduced into the 2H7 scFv MTH (SSS) WTCH2CH3 fusion protein (SEQ ID NO:______). The wild type leucine residue was substituted with serine by site-directed mutagenesis using the oligonucleotide Vhser11: 5′-gga ggt ggg agc tct cag gct tat cta cag cag tct ggg got gag tcg gtg agg α-3′ (SEQ ID NO:______). The 3′-primer for PCR was huIgG1-3′ having the sequence 5′-gtc tct aga cta tca ttt acc cgg aga cag-3′ (SEQ ID NO: (XbaI site underlined and italicized). After PCR amplification, the fragments were inserted into the TOPO® cloning vector and sequenced to confirm the presence of the V_{H}11 leucine to serine mutation. The 2H7 scFv-IgG (SSS-S)H WCH2 WCH3 encoding DNA was shuttled into the PSL1180 cloning vector (Pharmacia Biotech, Inc., Piscataway, N.J.). The construct PSL1180-2H7 scFv-IgG (SSS-S)H WCH2 WCH3 was digested with Sac and XbaI to remove the wild type V_{H} domain and the connecting region and CH2 and CH3 domains. The PCR product comprising the VH11 mutant was digested with Sac and XbaI and then inserted into the digested PSL1180 construct according to standard molecular biology procedures. The construct was then digested with Hind III and XbaI, and inserted into the mammalian expression vector pD18 (see methods described in Example 1 and Example 10). The mutant is designated 2H7 scFv V_{H} L11S IgG (SSS-S)H WCH2 WCH3. The polynucleotide sequence is provided in SEQ ID NO:______, and the encoded polypeptide sequence is provided in SEQ ID NO:______.

### Example 34

### Expression and of 2h7 scFv VH L11S (SSS-S)H WCH2 WCH3 in Stable CHO Lines

[0631] CHO DG44 cells were transfected by electroporation with approximately 150 micrograms of linearized expression plasmid encoding the 2H7 V_{H} L11S scFv (SSS-S)H WCH2 WCH3. Cultures were plated in selection media containing 100 nM methotrexate, in 96 well, flat bottom tissue culture plates at various numbers of cells/well, ranging from 125 to 2000. Methotrexate resistant clones were selected and culture supernatants were screened for the highest expressors of the fusion protein using a CD20CHO binding assay similar to that described for FIG. 1. Clones were amplified after the initial selection in gradually increasing doses of methotrexate. Cells were passaged for two passages in the higher concentration prior to adjusting the concentration to the next higher dose. Clones were amplified to a final concentration of 1 micromolar methotrexate.

[0632] FIG. 50B illustrates the production levels of 2H7 V_{H} L11S scFv (SSS-S)H WCH2 WCH3. Spent supernatants from amplified CHO cells expressing this molecule and growing in stationary T25 flasks were tested for quantitative binding to CD20 CHO cells by flow cytometry. The activity was converted to protein concentration by generation of a standard curve using the same molecule purified from supernatants with Protein A affinity chromatography (FIG. 50A). The concentration of the purified protein was determined by A280 using an extinction coefficient provided by the amino acid composition of the recombinant protein (Vector NTI). Although levels of production varied between clones tested, multiple clones produced over 1 mg/ml. This level of protein expression is over 10-fold higher than the identical molecule except for the amino acid change in V_{H}.

[0633] FIG. 51 illustrates the production levels of 2H7 VH L11S scFv (SSS-S)H WCH2 WCH3 by semi-quantitative analysis on SDS-PAGE. Ten microliters of spent supernatant from amplified CHO cells expressing this molecule and growing in stationary T25 flasks were mixed with 10 microliters 2×non-reducing SDS sample buffer, run on SDS-PAGE gels, and stained with coomassie blue.

### Example 35

### Construction and Binding Capacity of G28-1 scFv Ig Constructs

[0634] Contrstruction of the G28-1 (anti-CD37) scFv was performed using total RNA isolated from the G28-1 hybridoma using Trizol (Invitrogen) reagent according to manufacturer's instructions. cDNA was prepared using random primers and the protocol described previously for 2H7 cloning in Example 1. The variable domains of the scFv was cloned using one of two methods: the first method used a family of degenerate 5′ oligonucleotides specific for each V region gene family and a single 3′ primer specific for the constant region of either the light or heavy chain using methods and primers described in (Ig-Prime Kit Mouse Ig-Primer Set, Novagen). The second approach used the anchor-tailing methods and primers described in (Gilliland LK et al, Tissue Antigens 47: 1-20 (1995). In either case, PCR amplified products were cloned into the TOPO cloning vector (Invitrogen). The clones were digested with EcoRI and screened for inserts of the proper size. Positive clones were sequenced as previously described in Example 1.

[0635] Specific primers were then designed for each V region, one with the leader sequence and one without. Primers were also designed to include desired linkers and/or restriction sites at the primer ends. PCR reactions were performed on the TOPO cloned DNA using a 25 cycle program with the following profile: 94 C, 30 sec; 55 C, 30 sec; 72 C, 30 sec, followed by a final extension at 72 C for 8 minutes. PCR products were gel purified and fragments recovered using a QIAQUICK gel extraction kit (QIAGEN, Valencia, Calif.). Fragments were diluted 1:50 and 1 microliter used for SEWING PCR reactions according to the methods described in Example 1. The following oligonucleotides were used for the secondary PCR reactions of the V_{L} domain for the G28-1 scFv:

(SEQ ID NO _{——})

5′ primers with SalI site without leader:
5′-GTTGTTGTCGACATCCAGATGACTCAGTC
TCCA-3′

(SEQ ID NO _{——})

5′ primer with HindIII site and leader sequence:
5′-GTCAAGCTTGCCGCCATGGTATCCA
CAGCTCAGTTCCTTGG-3′

(SEQ ID NO _{——})

3′ primer:
5′-GCCACCCGACCCACCACCGCCCGAGCCACCGCCACCTTTGATCTCCA
GTTCGGTG CC-3′
The primers used for the VH domain are shown
below:

(SEQ ID NO _{——})

5′ sense primer:
TCGGGCGGTGGTGGGTCGGGTGGCGGCGGATCGTCAGCGGTCCAGCTGCA
GCAGTCTGGA-3′

(SEQ ID NO _{——})

3′ antisense primer with BclI site:
5′-TCAGTGCTGATCAGAAGAGACGGTGACTGAGGTTCCTTG-3′.

[0636] A change from leucine to serine at position 11 in the heavy chain variable region (Kabat numbering) was introduced in into the G28-1 scFv by site-directed mutagenesis. The wild type form of the G28-1 scFv was initially constructed by sewing/overlap PCR to insert a (gly4ser)₃ linker between the V_{L} and V_{H} domains as described above. However, no Sac I site was introduced as a part of this fusion of the variable domains, so alternative, nearby restriction sites (HaeII and PvuII) near leucine 11 were used to synthesize the VL+mutated V_{H} domain. Primers were designed to contain one of these sites and the DNA sequence including the L to S change, followed by 12 wild type base pairs. Several attempts at this strategy failed, so an alternative strategy using the Genetailor (Invitrogen) method of site directed mutagenesis was used to introduce the desired mutation. The mutagenesis was carried out according to manufacturer's instructions. Briefly the procedure involves methylation of the plasmid DNA with DNA methylase, amplification of the DNA in a mutagenesis reaction with two overlapping primers, one of which contains the target muations, trasformation of the plasmid into wild type E. coli which digests all methylated DNA and leaves only the unmethylated, mutated amplification product. Both primers are approximately 30 nucleotides in length (not including the mutation site on the mutagenic primer, with an overlapping region at the 5′ ends of 15-20 nucleotides, for efficient end-joining of the mutagenesis product. The template for the mutagenesis reaction was 100 ng of a plasmid containing the wild type G28-1 scFvIg construct, and the primers used for the G28-1 V_{H} mutagenesis are as follows:

(SEQ ID NO _{——})

Forward primer:
5′-GCAGCAGTCTGGACCTGAGTCGGAAAAGCCTG-3′

(SEQ ID NO _{——})

Reverse Primer:

5′-CTCAGGTCCAGACTGCTGCAGCTGGACCGC-3′

[0637] PCR reactions were performed using the 15 ng methylated template, the primers above, and the usual reaction components as previously described. A 20 cycle program with the following profile was used for amplification: 94 C, 30 sec; 55 C, 30 sec; 68 C, 8 min, followed by a final 68 C extension step for 10 minutes. PCR products were transformed into wild type bacteria, and colonies screened by sequencing. Clones with only the desired mutation were isolated and plasmid prepared as previously described Example 33. The mutant is designated G28-1 scFv VH L11S (SSS-S)H WCH2 WCH3. The polynucleotide sequence is provided in SEQ ID NO:______, and the encoded polypeptide sequence is provided in SEQ ID NO:______.

[0638] The expression level of G28-1 fusion proteins was confirmed using Immunblot analysis according to the methods described in Example 17. FIG. 53 illustrates a large increase in protein expression in the VH L11S mutant G28-1 fusion proteins compared to the G28-1 fusion protein without the mutation.

[0639] The G28-1 scFv Ig fusion proteins were transiently transfected and expressed in COS cells according to methods described in Example 10. FIG. 52 illustrates the capacity of the G28-1 scFv Ig fusion proteins from the COS supernatants to bind CD37. Ramos and BJAB cells both express human CD37, and were therefore used to screen the G28-1 supernatants for functional activity. Binding of G28-1 scFv (SSS-S)H WCH2 WCH3 and G28-1 scFv VH L11S (SSS-S)H WCH2 WCH3 to CD37+Ramos cells was measured by flow cytometry according to methods described in Example 2. Each point on the graph represents the mean of five replicate transfections. The graph illustrates that the G28-1 scFv V_{H} L11S (SSS-S)H WCH2 WCH3 is able to bind CD37+Ramos cells.

[0640] Addition constructs were made with different connecting regions. The pD18 G28-1 scFv VHL11S (SSS-S)H WCH2 WCH3 vector was digested with BclI and XbaI to remove the connecting region, CH2 and CH3. Theses were replaced with each different connecting region, CH2 and CH3 according to the methods described in Example 13. The new constructs were designated: G28-1 scFv VHL11S (CSS-S)H WH2 WH3 (SEQ ID NO______), G28-1 scFv VHL11S (CSC-S)H WH2 WH3 (SEQ ID NO______), G28-1 scFv VH L11S (CSS-S)H WH2 WH3 (SEQ ID NO______), G28-1 scFv VH L11S (SSC-P)H WH2 WH3 (SEQ ID NO______), G28-1 scFv VHL11S (SCS-S)H WH2 WH3 (SEQ ID NO______), G28-1 scFv VHL11S(CCS-P)H WH2 WH3 (SEQ ID NO______), and G28-1 scFv VHL11S (SCC-P)H WH2 WH3 (SEQ ID NO______).

[0641] The G28-1 scFv was also attached to an IgA connecting region, CH2, CH3 and an IgE CH2, CH3, CH4. The pD18 G28-1 scFv VHL11S (SSS-S) H WCH2 WCH3 plasmid was digested using methods above to remove the connecting region CH2, and CH3. The IgA regions were inserted using methods described in Example 13. The construct was designated G28-1 scFv VHL11S IgAH IgACH2 T4CH3 (SEQ ID NO______). The IgE CH2 CH3 CH4 region was inserted into the digested pD 18 vector above using methods described in Example 39. The construct was designated G28-1 scFv VHL11S IgECH2 CH3 CH4 (SEQ ID NO______).

### Example 36

[0642] Characterization of 2H7 scFv Ig Mutant Fusion Proteins

[0643] FIG. 54 illustrates the binding capacity of purified 2H7 scFv Ig constructs to CD20+CHO cells. The proteins were transfected into stable CHO cells according to methods described in Example 2. Binding was determined using flow cytometry according to the methods described in Example 2. The graph in FIG. 54 illustrates that these proteins retain binding function to CD20 with altered connecting regions. Comparative results were obtained in each of the 2H7 scFv VHL11S mutants with each type of altered connecting region (results omitted).

[0644] The ability of 2H7scFv-Ig constructs with mutated connecting regions to kill CD20 positive cells in the presence of peripheral blood mononuclear cells (PBMC) through ADCC was tested by measuring the release of ⁵¹Cr from labeled BJAB cells in a 4 hr. assay using 100:1 ratio of PBMC to BJAB cells. The results shown in FIG. 55 indicate that 2H7scFv-Ig mutants can mediate antibody dependent cellular cytotoxicity (ADCC), since the release of ⁵¹Cr was significantly higher in the presence of both PBMC and 2H7scFv-Ig than in the presence of either PBMC or 2H7scFv-Ig alone. Comparative results were obtained in each of the 2H7 scFv VHL11S mutants with each type of altered connecting region (results omitted).

[0645] The ability of 2H7scFv-Ig mutant fusion proteins to kill CD20 positive cells in the presence of complement was tested using B cell lines Ramos target cells. Rabbit complement was purchased from Pel-Freez (Rogers, A K), and was used in the assay at a final concentration of 1/10. Purified 2H7scFv-Ig was incubated with B cells and complement for 45 minutes at 37° C., followed by counting of live and dead cells by trypan blue exclusion. The results in FIG. 56 show that 2H7scFv-Ig mutants in the presence of rabbit complement, lysed B cells expressing CD20.

### Example 37

### Comparative Binding of IgA, IgG, and IgE 2H7 scFv Constructs

[0646] Binding capacity of Ig constructs IgA, IgG and IgG were measured using flow cytrometry according to the methods described in Example 2, using a commercially available (Caltag) second step specific for each Ig tail. The results in FIG. 57 show that all the IgE constructs were able to bind CD20+CHO cells comparable to the binding abilities of IgG and IgA. These results also demonstrate that the IgE constructs were detected with the IgE second step, but not the IgA or IgG second step.

### Example 38

### Construction and Characterization of 2H7 VH L11S IgE Constructs

[0647] IgE tail RNA was isolated from SKO-007 cells(ATCC) using QIAGEN QIAshredder homogenization and RNA minikits. Random-primed cDNA was generated according to the usual protocol, with 4 microliters RNA eluted from the QIAGEN columns. Human IgE from the beginning of CH1 through CH4 (approximately 1.2 kb) was isolated by PCR amplification of 5 microliters cDNA, with an amplification profile of 94 C, 60 sec; 72 C, 2 minutes for 35 cycles, and the following primers:
[0648] 5′ primer: 5′-ggatccacccgctgctgcaaaaacattccctccaatgccacctccgtgac-3′ (SEQ ID NO-
[0649] 3′ primer: 5′-tcatttaccgggatttacagacaccgctcgctggacggtctgtgaggggctcgctgc-3′ (SEQ ID NO______)

[0650] PCR fragments were ligated into PCR 2.1-TOPO vector, and transformants screened for inserts of the correct size by digestion with EcoRI according to the methods described in Example 1. One of the clones with the correct sequence from was used as template to amplify the CH2-CH4 domains with appropriate restriction sites attached for subcloning as soluble or cell surface (ORF) forms. The following primers were used with an amplification profile of 94 C, 60 sec; 55 C, 60 sec; 72 C, 2 min; for 35 cycles to amplify a fragment of approximately 950 bp:

(SEQ ID NO _{——})

5′ primer: (attaches BclI site to 5′ end of CH2
domain of IgE)
5′-gttgttgatcacgtctgctccagggacttcacc-3′

(SEQ ID NO _{——})

3′ primer: (attaches, stop codon and XbaI site to
3′ end of CH4 of IgE)
5′-
gttgtttctagattatcatttaccaggatttacagacaccgctcgctg-
3′

(SEQ ID NO _{——})

3′ primer: (attaches SfuI and BamHI to 3′ end of
CH4 without a stop codon)
5′-
gttgttttcgaaggatccgctttaccagatttacagacaccgctcgctg-
3′

[0651] The IgE CH2CH3CH4 tail with a stop codon was digested with BclI and XbaI and inserted into a pD18 vector that contains 2H7 VHL11S scFv. This construct was designated 2H7 IgECH2CH3CH4. The polynucleotide sequence is provided in SEQ ID NO:______, and the encoded polypeptide sequence is provided in SEQ ID NO:______. The IgE CH2CH3CH4 tail with no stop codon (ORF) was digested with BclI and SfuI and inserted in into a pD 18 vector that contains 2H7 VHL11S scFv. This construct was designated 2H7 IgECH2CH3CH4(ORF). The polynucleotide sequence is provided in SEQ ID NO:______, and the encoded polypeptide sequence is provided in SEQ ID NO:______.

[0652] The human IgE was also amplified as a fragment missing both CH1 and CH2 domains, with only the CH3 and CH4 domains attached to the human IgG1 hinge. Sequential PCR reactions using overlapping 5′ oligonucleotides were used to attach the IgG 1 hinge to the CH3 domain of human IgE. Primers for the first step of the PCR reaction:

(SEQ ID NO _{——})

5′ Primer:
5′-
actcacacatccccaccgtccccagcatccaacccgagaggggtgagc-
3′
Primers for the second step of the PCR reaction:

(SEQ ID NO _{——})

5′ primer:
5′-
tctgatcaggagcccaaatcttctgacaaaactcacacatccccaccg-
3′

(SEQ ID NO _{——})

3′ primer:
5′-
gttgtttctagattatcatttaccaggatttacagacaccgctcgctg-
3′

[0653] The PCR product was digested with EcoRI and sequenced according to the methods described in Example 1. Positive clones were inserted into pD18 plasmid containing 2H7 VHL11S scFv (SSS-S)H. The construct was designated 2H7 VHL11S scFv (SSS-S)H IgE CH3CH4. The polynucleotide sequence is provided in SEQ ID NO:______, and the encoded polypeptide sequence is provided in SEQ ID NO:______.

[0654] Binding capacity of 2H7 scFv VH L11S IgECH2 CH3 CH4, was measured using flow cytometry, essentially according to Example 2. The protein was purified using MEP HyperCel, (Cipergen, Catalog # 12035-010, Lot# 200920/0271) chromatography resin and Hydrophobic charge induction chromatography (HCIC). HCIC absorbent is a high capacity, high selectivity, absorbent designed for capture and purification of monoclonal and polyclonal antibodies from various sources including cell culture supernatants. Columns were packed with a 10 ml bead volume of MEP Hypercel, and equilibrated with PBS, pH 7.4 containing 0.1% NaN3. Approximately 1 liter of 2H7 scFv VHL11S IgE CH2CH3CH4 CHO culture supernatant was then run over the column. A series of citrate buffers ranging from pH 3-6 were prepared for elution of the fusion protein. The column was washed in PBS. Protein was eluted in fifteen 1 ml fractions at pH6, 5, and 4. A final 15 ml fraction was collected at pH 3.5. Aliquots from each fraction were analyzed for A280 and were also subjected to SDS-PAGE, loading roughly 10 micrograms/well based on the A280 reading. The results of these two analyses indicated that the bulk of the protein did not elute in citrate buffers at the higher pH, but eluted at pH4, and the post elution wash at pH3.5 also contained significant amounts of protein.

[0655] The ability of these 2H7 V_{H} L11S IgE purified proteins to bind CD20+CHO cells was determined using flow cytometry according to the methods described in Example 2 using FITC-conjugated goat-anti-human IgE. FIG. 58A illustrates that both purified proteins are able to bind CD20+CHO cells.

[0656] The ability of these 2H7 V_{H} L11S IgE purified proteins to mediate ADCC against BJAB target cells with PBMC effectors was measured according to the methods described in Example 2. FIG. 58B illustrates that both proteins were able to mediate ADCC at similar levels.

### Example 39

### Construction and Binding Capacity of scFv VH L11s Mutants with Mouse IgA And IgE Tail Regions

[0657] Murine IgA was cloned from murine spleen RNA using essentially the same methods used to clone the human IgE tails in Example 38. The PCR reactions were performed with a 94 C 60 sec; 52 C 60 sec; 72 C 2 min amplification profile for 35 cycles. The PCR primers used to clone CH1-CH4 regions were:

(SEQ ID NO _{——})

5′ primer:
5′-atctgttctcctcctactactcctcctccacct-3′

(SEQ ID NO _{——})

3′ primer:
5′-
tcagtagcagatgccatctccctctgacatgatgacagacacgct-3′

[0658] PCR primers used to delete the CH1 region:

(SEQ ID NO _{——})

5′ primer:
5′-
gttgttgatcacatctgttctcctcctactactcctcctccacct-3′

[0659] 3′ primer with a stop codon, XbaI site at end of Ig tail, and the T4 mutation in CH3 region:

(SEQ ID NO _{——})

5′-
gttgtttctagattatcaatctccctctgacatgatgacagacac-3′

[0660] 3′ primer for the ORF, a SfuI and BamHI sites, and T4 mutation in the CH3 region:

SEQ ID NO _{——})

5′-gttcttcgaaggatccgcatctccctctgacatgatgac-3′

[0661] The mouse IgACH2 T4CH3 tail with a stop codon was digested with BclI and XbaI and inserted into a pD18 vector that contains 2H7 VHL11S scFv and the IgAH. This construct was designated 2H7 VHL11 S scFv IgAH mIgACH2 T4CH3. The polynucleotide sequence is provided in SEQ ID NO:______, and the encoded polypeptide sequence is provided in SEQ ID NO:______.

[0662] The mouse IgACH2 T4CH3 tail with no stop codon (ORF) was digested with BclI and SfuI and inserted in into a pD 18 vector that contains 2H7 VHL11S scFv and IgAH. This construct was designated 2H7 VHL11S scFv IgAH mIgACH2 T4CH3 (ORF). The polynucleotide sequence is provided in SEQ ID NO:______, and the encoded polypeptide sequence is provided in SEQ ID NO:______.

[0663] Murine IgE was cloned murine IgE La2 (ATCC)RNA essentially according the methods described in Example 38. The PCR reactions were performed with a 94 C 60 sec; 52C 60 sec; 72 C 2 min amplification profile for 35 cycles. Initial PCR primers used to clone the CH1—CH4:

| | |
|---|---|
| 5′ primer: | |
| 5′-tctatcaggaaccctcagctctaccccttgaagccctg-3′ | (SEQ ID NO_) |
| 3′ primer: | |
| 5′-gttgtttctagattatcaggatggacggagggaggtgttaccaaggct-3′ | (SEQ ID NO_) |

[0664] PCR primers to remove the CH1 region:

| | |
|---|---|
| 5′ primer: | |
| 5′-gttgttgatcacgttcgacctgtcaacatcactgagcccacc-3′ | (SEQ ID NO_) |
| 3′ primer with stop codon and XbaI site: | |
| 5′-gttgtttctagattatcaggatggacggagggaggtgttaccaaggct-3′ | (SEQ ID NO_) |
| 3′ primer ORF, SfuI and Bam HI: | |
| 5′-gttgttttcgaaggatccgcggatggacggagggaggtgtta-3′ | (SEQ ID NO_) |

[0665] The mouse IgE CH2CH3CH4 tail with a stop codon was digested with BclI and XbaI and inserted into a pD 18 vector that contains 2H7 VHL11S scFv. This construct was designated 2H7 VHL11S mIgECH2CH3CH4. The polynucleotide sequence is provided in SEQ ID NO:______, and the encoded polypeptide sequence is provided in SEQ ID NO:______.

[0666] The mouse IgE CH2CH3CH4 tail with no stop codon (ORF) was digested with BclI and SfuI and inserted in into a pD18 vector that contains 2H7 VHL11S scFv. This construct was designated 2H7 VHL11S scFv mIgECH2CH3CH4(ORF). The polynucleotide sequence is provided in SEQ ID NO:______, and the encoded polypeptide sequence is provided in SEQ ID NO:______.

[0667] Binding capacity of 2H7 V_{H} L11S mIgE and mIgA (with mouse tail regions) to CD20+CHO cells were also measured by flow cytometry according to the methods described in Example 2 using commercially available IgE or IgA second step reagents (Caltag). Each point in FIG. 59 represents the mean of a population with brightness corrected by subtracting the binding of the second step alone. This figure illustrates that these constructs have the ability to bind CD20+CHO cells.

### Example 40

[0668] HPLC Profiles of 2H7 scFv ig Mutant Fusion Proteins

[0669] HPLC analysis of purified 2H7 scFv-Ig mutant fusion proteins with altered connecting and CH3 regions. Each protein was purified by Protein A affinity chromatography from supernatants of transfected COS or CHO cells. Twenty-five to fifty micrograms of each sample was run at 1 m/min in PBS on a TSK-GEL G3000S W_{XL} 30 cm column (Tosoh Biosep, Stuttgart, Germany). The arrow near the beginning of each profile represents the sample injection point. Gel filtration standards (Bio-Rad) included thryoglobulin (670 kDa), gamma globulin (158 kDa), ovalbumin (44 kDa), myoglobin (12.5 kDa), and vitamin B-12 (1.35 kDa). Standards were run at the beginning and end of each experiment. Migration positions of standards are shown and did not vary between experiments. (FIGS. 60-62)

### Example 41

### Binding Capacity of 2H7 Vh L11S Mutant Fusion Proteins

[0670] Binding effects of the CH3 mutant were compared to the non-mutated CH3 fusion protein. The constructs were transfected into COS cells and purified from the supernatant using protein A column purification techniques described in Example 2. FIG. 63 illustrates the differential effects of CH3 mutations on binding using flow cytometry according to the methods described in Example 2. This figure illustrates that some binding ability is lost when the double point mutation is introduced in the CH3 region.

[0671] Binding of fluorescein isothiocyanate (FITC) conjugated 2H7 V_{H} L11S mutant fusion proteins was determined using flow cytometry. A 1 mg/ml solution of FITC was prepared in DMSO. Fusion proteins were dialyzed in pH 9.3 bicarbonate buffer overnight at 4C in a volume of 2 liters. Concentration of the protein was adjusted to 1-5 mg/ml prior to conjugation. A series of Falcon 5 ml tubes was set up with varying FITC to protein ratios, ranging from 15-60, but minimally ratios of 20 and 40. Conjugation reactions were incubated at 37C for 30 minutes protected from light. Fluoresceing labeled protein was separated from free fluorescein on a 2 ml Sephadex G-25 column equilibrated with PBS, 0.5 M NaCl, and 1% NaN3. The fluorescein labeled protein eluted from the column first and was collected in a 5 ml tube. The degree of labeling was determined by measuring the absorbance of the diluted conjugate at 280 and 494 nm, and utilizing the formulas provided by technical services at Molecular Probes (Eugene, Oreg.). Data has been corrected for FITC: protein ratio. FIG. 64 illustrates that these constructs do not lose binding capacity when conjugated to a fluorescent marker.

[0672] Purified 2H7 V_{H} L11S constructs were run on a non-reducing SDS gel according to the methods described in Example 2. The migration patterns are presented in FIG. 65.

### Example 42

### Characterization of 2H7 scFv VH L11S(CSC-S)H WCH2 WCH3 in LEC13 CHO Cells

[0673] 2H7 scFv V_{H} L11S (CSC-S)H WCH2 WCH3 were transiently transfected and expressed in Lec13 CHO cells. Lec13CHO cells were used as the mammalian cell hosts for either the 2H7 scFv VHS11 hIgG1 (CSS-S)H WCH2 WCH3 and (CSC-S)H WCH2 WCH3 expressing plasmids in side-by-side transfections. All transfections were performed in 100 mm tissue culture dishes. Cells were transfected when approximately 90% confluent using lipofectamine 2000 (Invitrogen, Catalog #: 11668-027, 0.75 ml), following manufacturer's instructions. Both cell lines were grown in the presence of serum to promote and maintain adherence to the cell culture dishes, simplifying transfection manipulations, washes, and supernatant harvests. DNA: lipofectamine complexes were allowed to form in the absence of serum and antibiotics, following the suggested protocol/conditions recorded in the product insert. Culture supernatants were harvested 72 hours after transfection, and then again 72 hours after the first harvest. Fusion protein from the two CHO sources was isolated by protein A purification as previously described and used in CD20 binding and ADCC assays.

[0674] The ability of mutated fusion protein to mediate ADCC in CD20 positive cells was determined using the methods described in Example 2. Constructs expressed in Lec13 CHO cells exhibited better binding to CD20 CHO target cells and also showed significantly improved activity in ADCC assays relative to the CHO DG44 derived proteins at equivalent concentrations as illustrated in FIG. 67.

### Example 43

### Construction of High and Low Affinity CD16 Alleles

[0675] The low(V) and high(F) affinity alleles at position 158 of the human CD16 extracellular domain were cloned from cDNA derived from human PBMC using PCR assay. PCR reactions used random primed cDNA made from PBMC stimulated for 3 days with immobilized anti-CD3 antibody (64.1) prior to harvest. PCR reactions included 2, 4, 6 or 8 microliters of cDNA, each primer at 25 pmol, and an amplification profile of 94 C 60 sec; 55 C 60 sec; 72 C 2 min, for 35 cycles. The PCR primers are listed below:

| | |
|---|---|
| 5′ primer - no leader peptide: | |
| 5′-GTTGTTACCGGTGCAATGCGGACTGAAGATCTCCC | (SEQ ID NO_) |
| AAAGGCTGTG-3′ | |
| 3′ antisense primer: | |
| 5′-GTTGTTTGATCAGCCAAACCTTGAGTGATGGTGATGTTCACA-3′ | (SEQ ID NO_) |

[0676] Positive clones were sequenced, and inserted into a vector containing an efficient leader peptide and the (SSS-S)H P238SCH2 WCH3 human IgG tail. Two different versions of the CD16 ED fusion proteins were expressed. The first contained the F 158 (high affinity) and the second contained the V158 (low affinity) allele. Constructs were cloned into a (SSS-S)H P238S CH2 WCH3 pD18 plasmid and expressed in COS and CHO cells as previously described in examples 1 and 10. CHO clones were screened for expression using an IgG sandwich ELISA to determine relative expression levels of the fusion proteins in the culture supernatant using the following protocol: Immulon 1V plates were coated at 4C with 0.4 microgram/ml goat anti-human IgG (mouse Adsorbed), (CalTag, Catalog # H10500) in PBS buffer. Plates were then blocked in PBS/1.5% nonfat milk at 4C overnight. Plates were washed three times in PBS/0.1% Tween 20, then incubated with 100 microliters dilution series from CHO clone culture supernatants at room temperature for 3 hours. Four dilutions per clone were added to successive wells, diluting in 5 fold increments from 1:5 to 1:375. In addition a standard curve was derived using CTLA4 hIgG1 (SSS-S)H P238SCH2 WCH3 as a concentration standard. The dilution series utilized 5 fold dilutions starting at 0.5 micrograms/ml; a second set of 8 wells was used to make a 2-fold dilution series starting at 0.34 micrograms/ml. Plates were washed 3 times in PBS/0.1% Tween 20, and incubated with goat anti-human IgG, conjugated to horseradish peroxidase (GAH IgG-HRP) at 1:5000, in PBS/0.5% BSA for 1 hour. Plates were washed four times with PBS/0.1% Tween 20, then TMB chromagen substrate (BD-Pharmingen) was added for 10 minutes, and reactions stopped by addition of 100 microlites IN sulfuric acid. Plates were then read at 415 nm on a SpectraCount plate reader. Concentrations of fusion protein were estimated by comparison of the ODs in the linear range to the CTLA41g standard curve run on each plate.

[0677] Proteins were purified using Protein A purification and were directly conjugated to fluorescein isothiocyanate (FITC) as described in Example 42. These proteins were run out on SDS gels under reduced and nonreduced conditions according to the methods described in Example 2. The migration of these proteins is presented in FIG. 68.

[0678] The ability of the high and low CD 16 alleles to bind 2H7 VH111S(CSC-S)H WCH2 WCH3 or bind 2H7 VH111S (SSS-S)H(P238S)CH2 WCH3 expressed on the cell surface of CD20+CHO target cell is determined using flow cytometry according to the methods described in Example 2. The results in FIG. 69 demonstrate both the high and low affinity alleles were able to bind 2H7 VHL11S(CSC-S)H WCH2 WCH3 (SEQ ID NO ______) and lost some binding capabilities when the P238S mutation was introduced into the CH2 region of the construct (SEQ ID NO______).

### Example 44

### Mammalian Display System

[0679] FIG. 70A diagrams how FITC conjugates of FcRIII (CD16) soluble fusion proteins bind to 2H7 scFv-Ig constructs that are attached to CD20 expressed by CHO cells. The CD16 binding to a scFv-Ig provides a screening tool for detecting changes in CD16 binding to an altered scFv-Ig constructs containing targeted or site-specific mutations. Changes in CD 16 binding properties may be changes in binding of either CD 16 high affinity protein (158F) or CD16 low affinity protein (158 V) or both.

[0680] A schematic representation of such a screening process is diagrammed in FIG. 70B, where scFv-Ig constructs are displayed on the cell surface of mammalian cells. The scFv-Ig molecules in this example are displayed on the cell surface because they contain a transmembrane domain anchor. These molecules may represent a single scFv-Ig construct or may be introduced into a population of mammalian cells as a library of such molecules. Transfected cells with altered binding properties can then be panned, sorted, or otherwise isolated from other cells by altering the stringency of the selection conditions and using CD16 fusion proteins as the binding probe. Cells that express scFv-Ig molecules with altered binding to either CD16 high affinity allele (158F) or CD16 low affinity allele (158V) or both can be isolated. For example, this display system can be used to create a library of mutated Ig tails with short stretches of CH2 sequence replaced with randomized oligonucleotides or possibly randomization of a single residue with all possible amino acid substitutions, including synthetic amino acids. Once such a library is constructed, it can be transfected into COS cells by methods well known in the art. Transfectants can then be bound to the labeled CD 16 constructs, and panned or sorted based on their relative binding properties to multiple allelotypes/isoforms. Panned cells are harvested, and the plasmid DNA is isolated and then transformed into bacteria. This process may be repeated iteratively multiple times until single clones are isolated from the mammalian host cells (see Seed B and Aruffo A, PNAS 84: 3365-3369 (1987) and Aruffo A and Seed B, PNAS 84: 8573-8577 (1987)). One such use of this type of screening system would be to isolate Ig tails which bind equally well to both the high and low affinity alleles of CD16 with the goal of improving effector functions mediated by scFv-Ig constructs in multiple subpopulations of patients. Ig tails with altered binding properties to other Fc receptors can also be selected using the display system described. Other display systems for example those that use bacteriophage or yeast are not suitable for selection of Ig tails with altered FcR binding properties because of the requirement for glycosylation in the Ig CH2 domain that would not occur in non-mammalian systems.

[0681] This system is also useful for selection of altered scFv-Ig molecules that will be produced at higher levels. In this example, mammalian cells such as COS cells can be transfected with a library of scFv-Ig constructs in a plasmid that directs their expression to the cell surface. COS cells that express the highest levels of the scFv-Ig molecules can be selected by techniques well known in the art (for example panning, sterile cell sorting, magnetic bead separation, etc), and plasmid DNA is isolated for transformation into bacteria. After several rounds of selection single clones are isolated that encode scFv-Ig molecules capable of high level expression. When the isolated clones are altered to remove the membrane anchor and then expressed in mammalian cells, the scFv-Ig constructs will be secreted into the culture fluid in high levels. This reflects the common requirement of secreted glycoproteins and cell surface glycoproteins for a signal peptide and processing through the golgi for expression, so that selection for a molecule that illustrates an improvement in expression levels on the cell surface will also select for a molecule that illustrates an improvement in levels of secreted protein.

### Example 45

### Characterization of G28-1 MAbs and scFvs

[0682] Ability of G28-1 mAbs and scFvs to induce apoptosis was measured by binding Annexin V, using the methods described in Example 3. The results in FIG. 71 demonstrate that the Annexin V binding of G28-1 antibodies and scFv is increased when treated together with 2H7 antibodies and scFv constructs.

### Example 46

### Construction of FC2-2 scFv Constructs

[0683] Contrstruction of the FC2-2 (anti-CD16) scFv was performed using total RNA isolated from the FC2-2 hybridoma and cloned using methods described in Example 35. The polynucleotide sequence is provided in SEQ ID NO:______, and the encoded polypeptide sequence is provided in SEQ ID NO:______. The specific primers for the secondary PCR reaction are listed bellow. The following are primers for the light chain variable region:

| | |
|---|---|
| 5′ primer with HindIII site with no leader: | |
| 5′-GTTGTTAAGCTTGCCGCCATGGATTCAC | (SEQ ID NO_) |
| AGGCCCAGGTTCTT-3′ | |
| 5′ primer with SalI site and leader: | |
| 5′-GTTGTTGTCGACATTGTGATGTCACAGTCTCC | (SEQ ID NO_) |
| ATCCTCCCTA-3′ | |
| 3′ primer: | |
| 5′-TCAGTGCTGATCATGAGGAGACGGTGACTGAGGTTCCTT-3′ | (SEQ ID NO_) |

[0684] The following are primers for the heavy chain variable region:

| | |
|---|---|
| 5′ primer: | |
| 5′-TCGGGCGGTGGTGGGTCGGGTGGCGGCGGATCGTCACAGGTGCAGTTG | (SEQ ID NO_) |
| AAGGAGTCAGGA-3′ | |
| 3′ primer: | |
| 5′-ACCCGACCCACCACCGCCCGAGCCACCGCCACCTTTTATTTCCAGCTTG | (SEQ ID NO_) |
| GTGCCACCTCCGAA-3′ | |

[0685] A change from leucine to serine at position 11 in the heavy chain variable region (Kabat numbering) was introduced in into the FC2-2 scFv by site-directed mutagenesis according to the methods described in Example 33. The scFv was attached to the (SSS-S)H WCH2 WCH3 IgG tail according to methods described in Example 33. The mutant is designated FC2-2 scFv VH L11S (SSS-S)H WCH2 WCH3. The polynucleotide sequence is provided in SEQ ID NO:______, and the encoded polypeptide sequence is provided in SEQ ID NO:______.

### Example 47

### Construction of 5B9 scFv Constructs

[0686] Contrstruction of the 5B9 (anti-CD137) scFv was performed using total RNA isolated from the 5B9 hybridoma and cloned using methods described in Example 35. The polynucleotide sequence is provided in SEQ ID NO:______, and the encoded polypeptide sequence is provided in SEQ ID NO:______. The specific primers for the secondary PCR reaction are listed bellow. The following are primers for the light chain variable region:

| | |
|---|---|
| 5′ primer with HindIII site with no leader: | |
| 5′-GTTGTTAAGCTTGCCGCCATGAGGTTCT | (SEQ ID NO_) |
| CTGCTCAGCTTCTG-3′ | |
| 5′ primer with SalI site and leader: | |
| 5′-GTTGTTGTCGACATTTGTGATGACGCAGGCTG | (SEQ ID NO_) |
| CATTCTCCAATT-3′ | |
| 3′ primer: | |
| 5′-TCAGTGCTGATCAGAGGAGGACGGTGACTGAGGTTCCTTG-3′ | (SEQ ID NO_) |
| The following are primers for the heavy chain variable region: | |
| 5′ primer: | |
| 5′-CGGGCGGTGGTGGGTCGGGTGGCGGCGGATCGTCACAGGTGCAGCTGA | (SEQ ID NO_) |
| AGCAGTCAGGA-3′ | |
| 3′ primer: | |
| 5′-CCCGACCCACCACCGCCCGAGCCACCGCCACCCTTCAGCTCCAGCTTG | (SEQ ID NO_) |
| GTGCCAGCACC-3′ | |

[0687] A change from leucine to serine at position 11 in the heavy chain variable region (Kabat numbering) was introduced in into the 5B9 scFv by site-directed mutagenesis and attached to (SSS-S)H WCH2 WCH3 according to the methods described in Example 33. This construct was designated 5B9 scFv VHL11S(SSS-S)H WCH2 WCH3. The polynucleotide sequence is provided in SEQ ID NO:______, and the encoded polypeptide sequence is provided in SEQ ID NO:______.

### Example 48

### Construction of UCHL1 scFv Constructs

[0688] Contrstruction of the UCHL1 (anti-CD45RO) scFv was performed using total RNA isolated from the UCHL1 hybridoma and cloned using methods described in Example 35 The polynucleotide sequence is provided in SEQ ID NO:______, and the encoded polypeptide sequence is provided in SEQ ID NO:______. The following are primers for the light chain variable region:

| | |
|---|---|
| 5′ primer with HindIII site: | |
| 5′-GTTGTTAAGCTTGCCGCCATGAAGTTGCCTGTTAGGCTG | (SEQ ID NO_) |
| TTGGTGCTG-3′ | |
| 3′ primer with Sac site: | |
| 5′-AGAGCTCCCACCTCCTCCAGATCCACCACCGCCCGAGCCAC | (SEQ ID NO_) |
| CGCCATCTTTGATTTCCAGCTTGGT-3′ | |
| The following are primers for the heavy chain variable region: | |
| 5′ primer: | |
| 5′-TTTCAGAGTAATCTGAGAGCTCCCACCTCCTCCAGATCCACCACCGC | (SEQ ID NO_) |
| CCGA-3′ | |
| 3′ primer: | |
| 5′-TCAGTGCTGATCATGCAGAGAGACAGTGACCAGAGTCCC-3′ | (SEQ ID NO_) |

[0689] A change from leucine to serine at position 11 in the heavy chain variable region (Kabat numbering) was introduced in into the 5B9 scFv by site-directed mutagenesis and connected to a(SSS-S) HWCH2 WCH3 according to the methods described in Example 33. The mutant is designated UCHL1 scFv VH L11S (SSS-S)H WCH2 WCH3. The polynucleotide sequence is provided in SEQ ID NO:______, and the encoded polypeptide sequence is provided in SEQ ID NO:______.

### Example 49

### L6 VHL11S scFv (SSS-S)H WCH2 WCH3

[0690] A change from leucine to serine at position 11 in the heavy chain variable region (Kabat numbering) was introduced in into the L6 scFv (SSS-S)H WCH2 WCH3 (constructed according to methods described in Example 106) by site-directed mutagenesis according to the methods described in Example 33. The L6scFvIg (SSS-S)H WCH2 WCH3 pD18 plasmid was used as template. Positive clones were inserted into the pD18 plasmid containing (SSS-S)H WCH2 WCH3 according to methods described in Example 33. The mutant is designated L6 scFv V_{H} L11S (SSS-S)H WCH2 WCH3. The polynucleotide sequence is provided in SEQ ID NO:______, and the encoded polypeptide sequence is provided in SEQ ID NO:______. PCR primers are listed bellow:

| | |
|---|---|
| 5′ Primer with PstI restriction site: | |
| 5′-ggcggatctctgcagatccagttggtgcagtctggacctgagtcgaagaagcct | (SEQ ID NO_) |
| ggagag-3′ | |
| 3′ Primer: | |
| 5′-ggacagtgggagtggcacc-3′ | (SEQ ID NO_) |

### Example 50

### Construction of HD37 scFv VH11S Construct

[0692] A change from leucine to serine at position II in the heavy chain variable region (Kabat numbering) was introduced in into the HD37 scFv by site-directed mutagenesis according to the methods described in Example. 33. The HD37 scFv (SSS-S)H WCH2 WCH3 pD 18 plasmid was used as a template. Positive clones were inserted into the pD18 plasmid containing (SSS-S)H WCH2 WCH3 according to methods described in Example 33. The mutant is designated HD37 scFv V_{H} L11S (SSS-S)H WCH2 WCH3. The polynucleotide sequence is provided in SEQ ID NO:______, and the encoded polypeptide sequence is provided in SEQ ID NO:______. PCR primers are listed bellow:

| | |
|---|---|
| 5′ primer: | |
| 5′-caggttcagctgcagcagtctggggctgagtcggtgaggcctgg-3′ | (SEQ ID NO_) |
| 3′ primer: | |
| 5′-ggaggattcgtctgcagtcagagtggc-3′ | (SEQ ID NO_) |

### Example 51

### 2H7 scFv Vh11S Constructs

[0693] Additional 2H7 VH L11S constructs were made with different connecting regions. The pD18 2H7 scFv VHL11S (SSS-S)H WCH2 WCH3 vector was digested with BclI and XbaI to remove the connecting region, CH2 and CH3. Theses were replaced with each different connecting region, CH2 and CH3 according to the methods described in Example 13. The new constructs were designated: 2H7scFv VHL11S (CSS-S)H WH2 WH3 (SEQ ID NO______), 2H7scFv VHL11S (CSC-S)H WH2 WH3 (SEQ ID NO______). 2H7 scFv VHL IS was also attached to an IgA connecting region, CH2, CH3 and an IgE CH2, CH3, CH4. The pD18 2H7 scFv VH L11S (SSS-S)H WCH2 WCH3 plasmid was digested using methods above to remove the connecting region CH2, and CH3. The IgA regions were inserted using methods described in Example 13. The construct was designated 2H7 scFv VHL11S IgAH IgACH2 T4CH3 (SEQ ID NO______. The IgE CH2 CH3 CH4 region was inserted into the digested pD18 vector above using methods described in Example 39. The construct was designated 2H7 scFv VHL 1 S IgECH2 CH3 CH4 (SEQ ID NO______.

### Example 52

### 2H7 scFv VH L11S(CSC-S)H WCH2 WCH3

[0694] This construct has a 2H7 (anti-CD20) single chain Fv binding region with a point mutation at amino acid residue 11 in the heavy chain variable region, where the leucine has been changed to a serine, as described in Example 33. This binding region is connected to a human IgG1 connecting region, CH2 and CH3 region, where in the second cysteine and the proline in the connecting region have been changed to serines (SSS-S) as described in Example 32. The polynucleotide sequence is provided in SEQ ID NO:______, and the encoded polypeptide sequence is provided in SEQ ID NO:______.

### Example 53

### 2H7 scFv V_{H} L11S IgE CH2 CH3 CH4

[0695] This construct has a 2H7 (anti-CD20) single chain Fv binding region with a point mutation at amino acid residue 11 in the heavy chain variable region, where the leucine has been changed to a serine, as described in Example 33. This binding region is attached to a human IgE constant region containing CH2, CH3 and CH4 as described in Example 38. The polynucleotide sequence is provided in SEQ ID NO:______, and the encoded polypeptide sequence is provided in SEQ ID NO:______.

### Example 54

[0696] 2H7 scFv V_{H} L11S mIgE CH2 CH3 CH4

[0697] This construct has a 2H7 (anti-CD20) single chain Fv binding region with a point mutation at amino acid residue 11 in the heavy chain variable region, where the leucine has been changed to a serine, as described in Example 33. This binding region is attached to a mouse IgE constant region containing CH2, CH3 and CH4 as described in Example 39. The polynucleotide sequence is provided in SEQ ID NO:______, and the encoded polypeptide sequence is provided in SEQ ID NO:______.

### Example 55

### 2H7 scFv V_{H} L11S mIgAH WIgACH2 T4CH3

[0698] This construct has a 2H7 (anti-CD20) single chain Fv binding region with a point mutation at amino acid residue 11 in the heavy chain variable region, where the leucine has been changed to a serine, as described in Example 33. This binding region is attached to a connecting region from human IgA as desribed in Example 5. This connecting region is attached to a mouse IgA constant region consisting of a wild type CH2 region and a mutated CH3 region where there is a truncation of 4 amino acid residues prior to the 3′ stop codon as described in Example 39. The polynucleotide sequence is provided in SEQ ID NO:______, and the encoded polypeptide sequence is provided in SEQ ID NO:______.

### Example 56

### 2H7 scFv V_{H} L11S(SSS-S)H K322S CH2 WCH3

[0699] This construct has a 2H7 (anti-CD20) single chain Fv binding region with a point mutation at amino acid residue 11 in the heavy chain variable region, where the leucine has been changed to a serine, as described in Example 33. This binding region is connected to a mutated human IgG connecting region where all of the cysteines and one proline have been changed to serines (SSS-S) according to methods described in Example 5. The connecting region is attached to a mutated IgG CH2 region and a wild type IgG CH3 region. The K322S mutation in the CH2 region is at a residue 322, where a Lysine has been changed to a serine using overlapping PCR assay. An (SSS-S)H WCH2 WCH3 IgG1 template in the pD18 vector was used for PCR amplification, to create (SSS-S)H derivatives containing these CH2 mutations. PCR reactions used a cycling profile of 94 C, 30 sec; 55 C, 30 sec; 72 C, 30 sec. for 37 cycles to complete the reactions. This IgG1 derivative was constructed by using sequential PCR reactions with overlapping oligonucleotides in the primary and secondary reactions. The primary amplification primers introduced the mutation(s), but deleted one end of the Fc domain. Secondary reaction primers reattached these ends using overlapping primers. The first overlapping primer was added at the beginning of the PCR, the reactions allowed to proceed for 12 cycles, paused and then the second overlapping primer added to the reactions followed by 25 more cycles to complete the overlap extension PCR reactions.

[0700] Primers for the first PCR reaction:

| | |
|---|---|
| 5′ Primer: | |
| 5′-ggagatggttttctcgatgggggctgggagggctttgttggagaccgagcacttgtactcc-3′ | (SEQ ID NO ) |
| 3′ primer: | |
| 5′-ggacagtgggagtggcacc-3′ | (SEQ ID NO ) |

[0701] PCR products were cloned into TOPO vector and sequenced for verification. Positive vectors were used as templates for the second overlapping PCR reaction.

| | |
|---|---|
| 5′ primer: | |
| 5′ccgtctctgatcaggagcccaaatcttctgacaaaactcacacatccccaccgtccccagc-3′ | (SEQ ID NO ) |
| 5′ primer overlapping primer: | |
| 5′-tccccaccgtccccagcacctgaactcctggggggatcgtcagtcttcctcttccccc | (SEQ ID NO ) |
| caaaacc-3′ | |
| 3′ primer: | |
| 5′-caggaaacagctatgac-3′ | (SEQ ID NO ) |

[0702] PCR product was cloned into TOPO vector and sequenced. The polynucleotide sequence is provided in SEQ ID NO:______, and the encoded polypeptide sequence is provided in SEQ ID NO:______.

### Example 57

### 2H7 scFv VH L11S(CSS-S)H K322S CH2 WCH3

[0703] This construct has a 2H7 (anti-CD20) single chain Fv binding region with a point mutation at amino acid residue 11 in the heavy chain variable region, where the leucine has been changed to a serine, as described in Example 33. This binding region is attached to a mutant IgG connecting region, where the second and third cysteines have been changed to serines and the proline has been changed to serine (CSS-S), according to methods described in Example 13. The connecting region is attached to a mutated IgG CH2 region and a wild type IgG CH3 region. The K322S mutation in the CH2 region is at a residue 322, where a Lysine has been changed to a serine using overlapping PCR assay. region is attached to a mutated IgG CH2 region and a wild type IgG CH3 region. The mutation in the CH2 region was added by overlapping PCR reaction essentially according to Example 57, with (CSS-S)H WCH2 WHC3 IgG1 pD18 vector as a template in the first PCR reaction and different primers in the second PCR reaction, which are listed below.

| | |
|---|---|
| 5′ primer: | |
| 5′-ccgtctctgatcaggaccccaaatcttgtgacaaaactcacacatccccaccgtccccagc-3′ | (SEQ ID NO_) |
| 5′ overlapping primer: | |
| 5′-tccccaccgtccccagcacctgaactcctggggggatcgtcagtcttcctccccccaaaacc-3′ | |
| 3′ primer: | |
| 5′-caggaaacagctatgac-3′ | (SEQ ID NO ) |

[0704] PCR products were cloned into the TOPO vector and sequenced. The polynucleotide sequence is provided in SEQ ID NO:______, and the encoded polypeptide sequence is provided in SEQ ID NO:______.

### Example 58

### 2H7 scFv V_{H} L11S(SSS-S)H P331S CH2 WCH3

[0705] This construct has a 2H7 (anti-CD20) single chain Fv binding region with a point mutation at amino acid residue 11 in the heavy chain variable region, where the leucine has been changed to a serine, as described in Example 33. This binding region is connected to a mutated human IgG1 connecting region where all of the cysteines and one proline have been changed to serines (SSS-S) according to methods described in Example 5. The connecting region is attached to a mutated IgG1 CH2 region and a wild type IgG1 CH3 region. The mutation P331S mutation in the CH2 region, where the proline at residue 331 has been changed to a serine, was incorporated using a single PCR reaction, using a (SSS-S) H WCH2 WCH3 pD18 template and a cycling profile of 94 C, 30 sec; 55 C, 30 sec; 72 C, 30 sec, for 37 cycles. The specific primers for reaction are listed below.

| | |
|---|---|
| 5′ primer: | |
| 5′ccgtctctgatcaggagcccaaatcttctgacaaaactcacacatccccaccgtccccagc-3′ | (SEQ ID NO ) |
| 3′ Primers: | |
| 5′-gcagggtgtacacctgtggttctcggggctgccctttggctttggagatggttttctcgatggaggctgggagg-3′ | (SEQ ID NO ) |

[0706] The polynucleotide sequence is provided in SEQ ID NO:______, and the encoded polypeptide sequence is provided in SEQ ID NO:______.

### Example 59

### 2H7 scFv V_{H} L11S(CSS-S)H P331S CH2 WCH3

[0707] This binding region is attached to a mutant IgG connecting region, where the second and third cysteines have been changed to serines and the proline has been changed to serine (CSS-S), according to methods described in Example13. The connecting region is attached to a mutated IgG CH2 region and a wild type IgG CH3 region. The mutation P331S mutation in the CH2 region, where the proline at residue 331 has been changed to a serine, was incorporated using a single PCR reaction, using a (CSS-S)H WCH2 WCH3 pD18 template and a cycling profile of 94 C, 30 sec; 55 C, 30 sec; 72 C, 30 sec, for 37 cycles. The specific primers for reaction are listed below.

| | |
|---|---|
| 5′ primer: | |
| 5′-ccgtctctgatcaggaccccaaatcttgtgacaaaactcacacatccccaccgtccccagc-3′ | (SEQ ID NO ) |
| 3′ Primer: | |
| 5′-gcagggtgtacacctgtggttctcggggctgccctttggctttggagatggttttctcgatggaggctgggagg-3′ | (SEQ ID NO ) |

[0708] The polynucleotide sequence is provided in SEQ ID NO:______, and the encoded polypeptide sequence is provided in SEQ ID NO:

### Example 60

### 2H7 scFv VH L11S (SSS-S)H T256N CH2 WCH3

[0709] This construct has a 2H7 (anti-CD20) single chain Fv binding region with a point mutation at amino acid residue 11 in the heavy chain variable region, where the leucine has been changed to a serine, as described in Example 33. This binding region is connected to a mutated human IgG connecting region where all of the cysteines and one proline have been changed to serines (SSS-S) according to methods described in Example 5. The connecting region is attached to a mutated IgG CH2 region and a wild type IgG CH3 region. The T256N mutation in the CH2 region, the threonine at residue 256 has been changed to an asparagine, using the overlapping PCR methods described in Example 56. The specific primers are listed below.

[0710] Primers for the first PCR reaction:

| | |
|---|---|
| 5′ primer: | |
| 5′ttcctcttccccccaaaacccaaggacaccctcatgatctcccggaaccctgaggtcac-3′ | (SEQ ID NO ) |
| 3′ primer: | |
| 5′-ggacagtgggagtggcacc-3′ | (SEQ ID NO ) |

[0711] PCR product cloned into TOPO vector and sequenced. This product was used as the template in the second PCR reaction. Primers for the second PCR reaction:

| | |
|---|---|
| 5′ primer: | |
| 5′ccgtctctgatcaggagcccaaatcttctgacaaaactcacacatccccaccgtccccagc-3′ | (SEQ ID NO ) |
| 5′ overlapping primer: | |
| 5′-tccccaccgtccccagcacctgaactcctggggggatcgtcagtcttcctcttccccccaaaacc-3′ | (SEQ ID NO ) |
| 3′ primer: | |
| 5′-caggaaacagctatgac-3′ | (SEQ ID NO ) |

[0712] The polynucleotide sequence is provided in SEQ ID NO:______, and the encoded polypeptide sequence is provided in SEQ ID NO:

### Example 61

### 2H7 scFv VH L11S(SSS-S)H RTPE/QNAK (255-258) CH2 WCH3

[0713] This construct has a 2H7 (anti-CD20) single chain Fv binding region with a point mutation at amino acid residue 11 in the heavy chain variable region, where the leucine has been changed to a serine, as described in Example 33. This binding region is connected to a mutated human IgG connecting region where all of the cysteines and one proline have been changed to serines (SSS-S) according to methods described in Example 5. The connecting region is attached to a mutated IgG CH2 region and a wild type IgG CH3 region. The RTPE/QNAK mutation in the CH2 region, where residues 255-258 have been mutated from arginine, threonine, proline, glutamic acid to glutamine, asparagines, alanine and lysine, respectively, using the overlapping PCR reactions described in Example 56. The specific primers are listed below.

[0714] PCR primers for the first PCR reaction:

| | |
|---|---|
| 5′ primer: | |
| 5′-ttcctcttccccccaaaacccaaggacaccctcatgatctcccagaacgctaaggtcacatgc-3′ | (SEQ ID NO_) |
| 3′ primer: | |
| 5′-ggacagtgggagtggcacc-3′ | (SEQ ID NO ) |

[0715] The PCR product was cloned into TOPO vector, sequenced and used as a template for the second PCR reaction. The primers for the second PCR reaction:

| | |
|---|---|
| 5 primer: | |
| 5′ccgtctctgatcaggagcccaaatcttctgacaaaactcacacatccccaccgtccccagc-3′ | (SEQ ID NO ) |
| 5′ overlapping primer: | |
| 5′-tccccaccgtccccagcacctgaactcctggggggatcgtcagtcttcctcttccccccaaaacc-3′ | (SEQ ID NO ) |
| 3′ primer: | |
| 5′-caggaaacagctatgac-3′ | (SEQ ID NO ) |

[0716] The polynucleotide sequence is provided in SEQ ID NO:______, and the encoded polypeptide sequence is provided in SEQ ID NO:

### Example 62

### 2H7 scFv VH L11S (SSS-S)H K2900 CH2 WCH3

[0717] This construct has a 2H7 (anti-CD20) single chain Fv binding region with a point mutation at amino acid residue 11 in the heavy chain variable region, where the leucine has been changed to a serine, as described in Example 33. This binding region is connected to a mutated human IgG1 connecting region where all of the cysteines and one proline have been changed to serines (SSS-S) according to methods described in Example 5. The connecting region is attached to a mutated human IgG1 CH2 region and a wild type human IgG1 CH3 region. The K290Q mutation in the CH2 region, where the Lysine at residue 290 has been changed to a Glutamine, using a single PCR reaction according to the methods described in Example 58. The specific primers used in this reaction are listed below.

| | |
|---|---|
| 5′ primer: | |
| 5′ccgtctctgatcaggagcccaaatcttctgacaaaactcacacatccccaccgtccccagc-3′ | (SEQ ID NO ) |
| 3′ primer: | |
| 5′-gctcccgcggctgtgtcttggc-3′ | (SEQ ID NO ) |

[0718] PCR products were cloned into TOPO and sequenced. The polynucleotide sequence is provided in SEQ ID NO:______, and the encoded polypeptide sequence is provided in SEQ ID NO:______.

### Example 63

### 2H7 scFv VH L11S (SSS-S)H A339P CH2 WCH3

[0719] This construct has a 2H7 (anti-CD20) single chain Fv binding region with a point mutation at amino acid residue 11 in the heavy chain variable region, where the leucine has been changed to a serine, as described in Example 33. This binding region is connected to a mutated human IgG1 connecting region where all of the cysteines and one proline have been changed to serines (SSS-S) according to methods described in Example 5. The connecting region is attached to a mutated human IgG1 CH2 region and a wild type human IgG1 CH3 region. The A339P mutation in the CH2 region, where the alanine at residue 339 has been changed to a proline, using a single PCR reaction according to the methods described in Example 58. The specific primers used in this reaction are listed below.

| | |
|---|---|
| 5′ primer: | |
| 5′ccgtctctgatcaggagcccaaatcttctgacaaaactcacacatccccaccgtccccagc-3′ | (SEQ ID NO ) |
| 3′ Primer: | |
| 5′-ggaggtgggcagggtgtacacctgtggttctcggggctgccctttgggtttggagatgg-3′ | (SEQ ID NO ) |

[0720] PCR products were cloned into TOPO and sequenced. The polynucleotide sequence is provided in SEQ ID NO:______, and the encoded polypeptide sequence is provided in SEQ ID NO:______.

### Example 64

### G28-1 scFv (SSS-S)H WCH2 WCH3

[0721] This construct has a G28-1 (anti-CD37) single chain Fv binding region made according to methods described in Example 35. This binding region is connected to a mutated human IgG1 connecting region where all of the cysteines and one proline have been changed to serines (SSS-S) according to methods described in Example 5. This connecting region is connected to a wild type human IgG1 CH2 and CH3 region as described in Example 1. This construct has previously been referred to as G28-1-MHWTG1C and G28-1 scFv Ig, both have the same sequence as the abouve construct. The polynucleotide sequence is provided in SEQ ID NO:______, and the encoded polypeptide sequence is provided in SEQ ID NO:______.

### Example 65

[0722] G28-1 scFv IgAH WCH2 WCH3

[0723] This construct has a G28-1 (anti-CD37) single chain Fv binding region made according to methods described in Example 35. This binding region is connected to a human IgA connecting region and wild type human IgG CH2 and CH3 constant regions as described in Example 5. This construct has previously been referred to as: G28-1-IgAHWTG1C. The polynucleotide sequence is provided in SEQ ID NO:______, and the encoded polypeptide sequence is provided in SEQ ID NO:______.

### Example 66

[0724] G28-1 scFv V_{H} L11S(SSS-S)H WCH2 WCH3

[0725] This construct has a G28-1 (anti-CD37) single chain Fv binding region with a point mutation at amino acid residue 11 in the heavy chain variable region, where the leucine has been changed to a serine as described in Example 35. This binding region is connected to a mutated human IgG1 connecting region where all of the cysteines and one proline have been changed to serines (SSS-S) according to methods described in Example 5. This connecting region is attached to wild type human IgG1 CH2 and CH3 region as described in Example 1. The polynucleotide sequence is provided in SEQ ID NO:______, and the encoded polypeptide sequence is provided in SEQ ID NO:______.

### Example 67

### G28-1 scFv V_{H} L11S (CSS-S)H WCH2 WCH3

[0726] This construct has a G28-1 (anti-CD37) single chain Fv binding region with a point mutation at amino acid residue 11 in the heavy chain variable region, where the leucine has been changed to a serine as described in Example 35. This binding region is attached to a mutant human IgG1 connecting region, where the second and third cysteines have been changed to serines and the proline has been changed to serine (CSS-S), according to methods described in Example 13. This connecting region is attached to wild type human IgG1 CH2 and CH3 region as described in Example 1. The polynucleotide sequence is provided in SEQ ID NO:______, and the encoded polypeptide sequence is provided in SEQ ID NO:______.

### Example 68

[0727] G28-1 scFv V_{H} L11S(CSC-S)H WCH2 WCH3

[0728] This construct has a G28-1 (anti-CD37) single chain Fv binding region with a point mutation at amino acid residue 11 in the heavy chain variable region, where the leucine has been changed to a serine as described in Example 35. This binding region is attached to a mutant human IgG1 connecting region, where the second cysteine and the proline has been changed to serine (CSC-S), according to methods described in Example 32. This connecting region is attached to wild type human IgG1 CH2 and CH3 region as described in Example 1. The polynucleotide sequence is provided in SEQ ID NO:______, and the encoded polypeptide sequence is provided in SEQ ID NO:______.

### Example 69

### G28-1 scFv V_{H} L11S(SSC-P)H WCH2 WCH3

[0729] This construct has a G28-1 (anti-CD37) single chain Fv binding region with a point mutation at amino acid residue 11 in the heavy chain variable region, where the leucine has been changed to a serine as described in Example 35. This binding region is attached to a mutant human IgG1 connecting region, where the first and second cysteines have been changed to serines (SSC-P), according to methods described in Example 13. This connecting region is connected to a wild type human IgG1 CH2 and CH3 region as described in Example 1. The polynucleotide sequence is provided in SEQ ID NO:______, and the encoded polypeptide sequence is provided in SEQ ID NO:______.

### Example 70

### CTLA4 (SSS-S)H P238SCH2 WCH3

[0730] This construct has the extra cellular CTLA-4 binding region as described in Example 14. This binding region is connected to a mutated human IgG1 connecting region where all of the cysteines and one proline have been changed to serines (SSS-S) according to methods described in Example 5. This hinge region is attached to a mutated human IgG1 CH2 region and a wild type human IgG1 CH3 region. The P238S mutation, where a proline at residue 238 was changed to a serine, was introduced using a PCR assay. PCR reactions were performed using random primed cDNA prepared from human tonsil B cell RNA. PCR amplifications used an amplification profile of 94 C 4 min; [94 C 1 min; 55 C 1 min; 72 C min; for 30 cycles followed by a final extension step for 6 minutes at 72 C. PCR fragments were TOPO cloned and clones with EcoRI inserts of approximately 800 bp were sequenced as described in Example 1. The primers used for the PCR are listed below:

| | | |
|---|---|---|
| 5′ primer: | 5′- | (SEQ ID NO ) |
| | gttgttgatcaggagcccaaatcttctgacaaaactcacacatctccaccgtccccagcacctgaactcctgggtgg | |
| | accgtcagtcttcc-3′ | |
| 3′ primer: | 5′gttgtttctagattatcatttacccggagacag-3′ | (SEQ ID NO ) |

[0731] This construct has previously been referred to as CTLA-4 IgG MTH (SSS) MTCH2WTCH3, which has the same sequence as the above construct. The polynucleotide sequence is provided in SEQ ID NO:______, and the encoded polypeptide sequence is provided in SEQ ID NO:______.

### Example 71

### CTLA4 (CCC-P) WH WCH2 WCH3

[0732] This construct has a CTLA-4 binding region as described in Example 14. This binding region is attached to a wild type human IgG1 connecting region (CCC-P) as described in Example 1. This connecting region is connected to a wild type human IgG1 CH2 and CH3 region as described in Example 1. This construct has previously been referred to as CTLA-4 IgG WTH (CCC) WTCH2CH3, which has the same sequence as the above construct. The polynucleotide sequence is provided in SEQ ID NO:______, and the encoded polypeptide sequence is provided in SEQ ID NO:______.

### Example 72

[0733] FC2-2 scFv (SSS-S)H WCH2 WCH3

[0734] This construct has a FC₂₋₂ (anti-CD16) single chain Fv made according to methods described in Example 46. This binding region is connected to a mutated human IgG1 connecting region where all of the cysteines and one proline have been changed to serines (SSS-S) according to methods described in Example 5. This connecting region is connected to a wild type human IgG1 CH2 and CH3 region as described in Example 1. The polynucleotide sequence is provided in SEQ ID NO:______, and the encoded polypeptide sequence is provided in SEQ ID NO:______.

### Example 73

### FC2-2 scFv VHL11S(SSS-S)H WCH2 WCH3

[0735] This construct has a FC2-2 (anti-CD 16) single chain Fv with a point mutation at amino acid residue 11 in the heavy chain variable region, where the leucine has been changed to a serine as described in Example 46. This binding region is connected to a mutated human IgG1 connecting region where all of the cysteines and one proline have been changed to serines (SSS-S) according to methods described in Example 5. This connecting region is connected to a wild type human IgG1 CH2 and CH3 region as described in Example 1. The polynucleotide sequence is provided in SEQ ID NO:______, and the encoded polypeptide sequence is provided in SEQ ID NO:______.

### Example 74

### UCHL-1 scFv (SSS-S)H WCH2 WCH3

[0736] This construct has a UCHL-1 (anti-CD45RO) single chain Fv made according to methods described in Example 48. This binding region is connected to a mutated human IgG1 connecting region where all of the cysteines and one proline have been changed to serines (SSS-S) according to methods described in Example 5. This connecting region is connected to a wild type human IgG1 CH2 and CH3 region as described in Example 1. The polynucleotide sequence is provided in SEQ ID NO:______, and the encoded polypeptide sequence is provided in SEQ ID NO:______.

### Example 75

### UCHL-1 scFv VHL11S(SSS-S)H WCH2 WCH3

[0737] This construct has a UCHL-1 (anti-CD45RO) single chain Fv with a point mutation at amino acid residue 11 in the heavy chain variable region, where the leucine has been changed to a serine as described in Example 48. This binding region is connected to a mutated human IgG1 connecting region where all of the cysteines and one proline have been changed to serines (SSS-S) according to methods described in Example 5. This connecting region is connected to a wild type human IgG1 CH2 and CH3 constant region as described in Example 1. The polynucleotide sequence is provided in SEQ ID NO:______, and the encoded polypeptide sequence is provided in SEQ ID NO:______.

### Example 76

### 5B9 scFv (SSS-S)H WCH2 WCH3

[0738] This construct has a 5B9 (anti-CD137) single chain Fv made according to methods described in Example 47. This binding region is connected to a mutated human IgG1 connecting region where all of the cysteines and one proline have been changed to serines (SSS-S) according to methods described in Example 5. This connecting region is connected to a wild type human IgG1 CH2 and CH3 constant region as described in Example 1. This construct has previously been referred to as 5B9 scFv IgG MTH (SSS) WTCH2CH3, which has the same sequence as the above construct. The polynucleotide sequence is provided in SEQ ID NO:______, and the encoded polypeptide sequence is provided in SEQ ID NO:______.

### Example 77

### 5B9 scFv VHL11S(SSS-S)H WCH2 WCH3

[0739] This construct has a 5B9 (anti-CD137) single chain Fv with a point mutation at amino acid residue 11 in the heavy chain variable region, where the leucine has been changed to a serine as described in Example 47. This binding region is connected to a mutated human IgG1 connecting region where all of the cysteines and one proline have been changed to serines (SSS-S) according to methods described in Example 5. This connecting region is connected to a wild type human IgG1 CH2 and CH3 constant region as described in Example 1. The polynucleotide sequence is provided in SEQ ID NO:______, and the encoded polypeptide sequence is provided in SEQ ID NO:______.

### Example 78

### 2H7 scFv (SSS-S)H WCH2 WCH3

[0740] This construct has a 2H7 (anti-CD20) single chain Fv binding region as described in Example 1. This binding region is connected to a mutated human IgG1 connecting region where all of the cysteines and one proline have been changed to serines (SSS-S) according to methods described in Example 5. This connecting region is connected to a wild type IgG1 CH2 and CH3 constant region as described in Example 1. This construct has previously been referred to as 2H7-MHWTG1C, CytoxB-(MHWTG1C)—Ig, anti-CD20 scFv IgG MTH (SSS) WTCH2CH3, CytoxB-MHWTG1C, 2H7 scFv-human IgG1 wild type hinge-CH2—CH3, and 2H7 scFv IgG MTH (SSS) WTCH2CH3, which all have the same sequence as the above construct. The polynucleotide sequence is provided in SEQ ID NO:______, and the encoded polypeptide sequence is provided in SEQ ID NO:______.

### Example 79

### 2H7 scFv (SSS-S)H P238SCH2 WCH3

[0741] This construct has a 2H7 (anti-CD20) single chain Fv binding region as described in Example 1. This binding region is connected to a mutated human IgG1 connecting region where all of the cysteines and one proline have been changed to serines (SSS-S) according to methods described in Example 5. This binding region is connected to a mutated human IgG1 connecting region where all of the cysteines and one proline have been changed to serines (SSS-S) according to methods described in Example 5. This hinge region is attached to a mutated human IgG1 CH2 region and a wild type human IgG1 CH3 region. The P238S mutation, where a proline at residue 238 was changed to a serine, was introduced according to methods described in Example 70. This construct has previously been referred to as 2H7 scFv IgG MTH (SSS) MTCH2WTCH3, anti-CD20 scFv IgG MTH (SSS) MTCH2CH3, and CytoxB-MHMG1C which all have the same sequence as the above construct. The polynucleotide sequence is provided in SEQ ID NO:______, and the encoded polypeptide sequence is provided in SEQ ID NO:

### Example 80

### 2H7 scFv IgAH WCH2 WCH3

[0742] This construct has a 2H7 (anti-CD20) single chain Fv binding region as described in Example 1. This binding region is connected to a human IgA connecting region and wild type human IgG1 CH2 and CH3 constant regions as described in Example 5. This construct has previously been referred to as 2H7 scFv IgAH IgG WTCH2CH3, 2H7 scFv IgA hinge-IgG1 CH2—CH3, and CytoxB-IgAHWTHG1C, which all have the same sequence as the above construct. The polynucleotide sequence is provided in SEQ ID NO:______, and the encoded polypeptide sequence is provided in SEQ ID NO:______.

### Example 81

### 2H7 scFv IgAH WIgACH2 T4CH3

[0743] This construct has a 2H7 (anti-CD20) single chain Fv binding region as described in Example 1. This binding region is attached to a connecting region from human IgA as described in Example 5. This connecting region is attached to a human IgA constant region consisting of a wild type CH2 region and a mutated CH3 region where there is a truncation of 4 amino acid residues prior to the 3′ stop codon as described in Example 13. This construct has previously been referred to as 2H7 scFv IgAH IgAT4, which has the same sequence as the above construct. The polynucleotide sequence is provided in SEQ ID NO:______, and the encoded polypeptide sequence is provided in SEQ ID NO:______.

### Example 82

[0744] 2H7 scFv IgAH WIgACH2 WCH3+Jchain

[0745] This construct has a 2H7 (anti-CD20) single chain Fv binding region as described in Example 1. This binding region is attached to a wild type human IgA connecting region as described in Example 5. This connecting region is attached to a wild type human IgA CH2 and CH3 constant region according to methods described in Example 13. This constant region is attached to a J-chain region as described in Example 13. The polynucleotide sequence is provided in SEQ ID NO:______, and the encoded polypeptide sequence is provided in SEQ ID NO:______.

### Example 83

### 2H7 scFv (CCC-P) WH WCH2 WCH3

[0746] This construct has a 2H7 (anti-CD20) single chain Fv binding region as described in Example 1. This binding region is attached to a wild type human IgG1 connecting region (CCC-P) as described in Example 1. This connecting region is attached to wild type human IgG1 CH2 and CH3 constant regions as described in Example 1. This construct has previously been referred to as 2H7 scFv Ig WTH (CCC) WTCH2CH3, 2H7 scFv IgG WTH WTCH2CH3, and 2H7 scFv-Ig, which both have the same sequence as the above construct. The polynucleotide sequence is provided in SEQ ID NO:______, and the encoded polypeptide sequence is provided in SEQ ID NO:______.

### Example 84

### 2H7 scFv (SSS-S)H WCH2 F405YCH3

[0747] This construct has a 2H7 (anti-CD20) single chain Fv binding region as described in Example 1. This binding region is connected to a mutated human IgG1 connecting region where all of the cysteines and one proline have been changed to serines (SSS-S) according to methods described in Example 5. This connecting region is attached to a wild type human IgG1 CH2 and a mutated human IgG1 CH3 region. The F405Y mutation, where the phenylalanine at residue 405 has been changed to a tyrosine, was introduced according to methods described in Example 21. This construct has previously been referred to as 2H7 scFv MTH WTCH2 MTCH3 Y405, which has the same sequence as the above construct. The polynucleotide sequence is provided in SEQ ID NO:______, and the encoded polypeptide sequence is provided in SEQ ID NO:______.

### Example 85

### 2H7 scFv (SSS-S)H WCH2 F405aCH3

[0748] This construct has a 2H7 (anti-CD20) single chain Fv binding region as described in Example 1. This binding region is connected to a mutated human IgG1 connecting region where all of the cysteines and one proline have been changed to serines (SSS-S) according to methods described in Example 5. This connecting region is attached to a wild type human IgG1 CH2 and a mutated human IgG1 CH3 region. The F405a mutation, where the phenylalanine at residue 405 has been changed to an alanine, was introduced according to methods described in Example 21. This construct has previously been referred to as 2H7 scFv MTH WTCH2 MTCH3 A405, which has the same sequence as the above construct. The polynucleotide sequence is provided in SEQ ID NO:______, and the encoded polypeptide sequence is provided in SEQ ID NO:______.

### Example 86

### 2H7 scFv (SSS-S)H WCH2 Y407ACH3

[0749] This construct has a 2H7 (anti-CD20) single chain Fv binding region as described in Example 1. This binding region is connected to a mutated human IgG1 connecting region where all of the cysteines and one proline have been changed to serines (SSS-S) according to methods described in Example 5. This connecting region is attached to a wild type human IgG1 CH2 and a mutated human IgG1 CH3 region. The Y407A mutation, where the tyrosine at residue 407 has been changed to an alanine, was introduced according to methods described in Example 21. This construct has previously been referred to as scFv MTH WTCH2 MTCH3 A407, which has the same sequence as the above construct. The polynucleotide sequence is provided in SEQ ID NO:______, and the encoded polypeptide sequence is provided in SEQ ID NO:______.

### Example 87

### 2H7 scFv (SSS-S) HWCH2 F405a, Y407ACH3

[0750] This construct has a 2H7 (anti-CD20) single chain Fv binding region as described in Example 1. This binding region is connected to a mutated human IgG1 connecting region where all of the cysteines and one proline have been changed to serines (SSS-S), according to methods described in Example 5. This connecting region is attached to a wild type human IgG1 CH2 and a mutated human IgG1 CH3 region. The F405a and Y407A mutation, where the phenylalanine at residue 405 has been changed to an alanine and the tyrosine at residue 407 has been changed to an alanine, was introduced according to methods described in Example 21. This construct has previously been referred to as scFv MTH WTCH2 MTCH3 A405a407, which has the same sequence as the above construct. The polynucleotide sequence is provided in SEQ ID NO:______, and the encoded polypeptide sequence is provided in SEQ ID NO:______.

### Example 88

### 2H7 scFv (CSS-S)H WCH2 WCH3

[0751] This construct has a 2H7 (anti-CD20) single chain Fv binding region as described in Example 1. This binding region is attached to a mutant human IgG 1 connecting region, where the second and third cysteines have been changed to serines and the proline has been changed to serine (CSS-S), according to methods described in Example 13. This connecting region is attached to wild type human IgG1 CH2 and CH3 constant regions as described in Example 1. This construct has previously been referred to as 2H7 scFv MTH (CSS) WTCH2CH3, which has the same sequence as the above construct. The polynucleotide sequence is provided in SEQ ID NO:______, and the encoded polypeptide sequence is provided in SEQ ID NO:______.

[0752] Example 89

### 2H7 scFv (SCS-S)H WCH2 WCH3

[0753] This construct has a 2H7 (anti-CD20) single chain Fv binding region as described in Example 1. This binding region is attached to a mutant human IgG1 connecting region, where the first and third cysteines have been changed to serines and the proline has been changed to serine (SCS-S), according to methods described in Example 13. This connecting region is attached to wild type human IgG1 CH2 and CH3 constant regions as described in Example 1. This construct has previously been referred to as 2H7 scFv IgG MTH (SCS) WTCH2CH3, which has the same sequence as the above construct. The polynucleotide sequence is provided in SEQ ID NO:______, and the encoded polypeptide sequence is provided in SEQ ID NO:______.

### Example 90

[0754] 2H7 scFv (SSC-P)H WCH2 WCH3

[0755] This construct has a 2H7 (anti-CD20) single chain Fv binding region as described in Example 1. This binding region is attached to a mutant human IgG1 connecting region, where the first and second cysteines have been changed to serines (SSC-P), according to methods described in Example 13. This connecting region is attached to wild type human IgG1 CH2 and CH3 constant regions as described in Example 1. This construct has previously been referred to as 2H7 scFv MTH (SSC) WTCH2CH3, which has the same sequence as the above construct. The polynucleotide sequence is provided in SEQ ID NO:______, and the encoded polypeptide sequence is provided in SEQ ID NO:______.

### Example 91

### 2H7 scFv (CSC-S)H WCH2 WCH3

[0756] This construct has a 2H7 (anti-CD20) single chain Fv binding region as described in Example 1. This binding region is attached to a mutant human IgG 1 connecting region, where the second cysteine and the proline has been changed to serine (CSC-S), according to methods described in Example 32. This connecting region is attached to wild type human IgG1 CH2 and CH3 constant regions as described in Example 1. This construct has previously been referred to as 2H7 scFv MTH (CSC) WTCH2CH3, which has the same sequence as the above construct. The polynucleotide sequence is provided in SEQ ID NO:______, and the encoded polypeptide sequence is provided in SEQ ID NO:______.

### Example 92

### 2H7 scFv (CCS-P)H WCH2 WCH3

[0757] This construct has a 2H7 (anti-CD20) single chain Fv binding region as described in Example 1. This binding region is attached to a mutant human IgG1 connecting region, where third cysteine has been changed to a serine (CCS-P), according to methods described in Example 22. This connecting region is attached to wild type human IgG1 CH2 and CH3 constant regions as described in Example 1. This construct has previously been referred to as 2H7 scFv MTH (CCS) WTCH2CH3, which has the same sequence as the above construct. The polynucleotide sequence is provided in SEQ ID NO:______, and the encoded polypeptide sequence is provided in SEQ ID NO:______.

### Example 93

### 2H7 scFv (SCC-P)H WCH2 WCH3

[0758] This construct has a 2H7 (anti-CD20) single chain Fv binding region as described in Example 1. This binding region is attached to a mutant human IgG1 connecting region, where first cysteine has been changed to a serine (SCC-P), according to methods described in Example 32. This connecting region is attached to wild type human IgG1 CH2 and CH3 constant regions as described in Example 1. This construct has previously been referred to as 2H7 scFv MTH (SCC) WTCH2CH3, which has the same sequence as the above construct. The polynucleotide sequence is provided in SEQ ID NO:______, and the encoded polypeptide sequence is provided in SEQ ID NO:______.

### Example 94

### 2H7 scFv V_{H} L11S(SSS-S)H WCH2 WCH3

[0759] This construct has a 2H7 (anti-CD20) single chain Fv binding region with a point mutation at amino acid residue 11 in the heavy chain variable region, where the leucine has been changed to a serine as described in Example 33. This binding region is connected to a mutated human IgG1 connecting region where all of the cysteines and one proline have been changed to serines (SSS-S) according to methods described in Example 5. This connecting region is attached to wild type human IgG1 CH2 and CH3 constant regions as described in Example 1. This construct has previously been referred to as 2H7 scFv VH11SER IgG MTH (SSS) WTCH2CH3 and 2H7 scFv VHSER11 WTH WTCH2CH3, which both have the same sequence as the above construct. The polynucleotide sequence is provided in SEQ ID NO:______, and the encoded polypeptide sequence is provided in SEQ ID NO:______.

### Example 95

### 2H7 scFv V_{H} L11S(CSS-S)H WCH2 WCH3

[0760] This construct has a 2H7 (anti-CD20) single chain Fv binding region with a point mutation at amino acid residue 11 in the heavy chain variable region, where the leucine has been changed to a serine as described in Example 33. This binding region is attached to a mutant human IgG1 connecting region, where the second and third cysteines have been changed to serines and the proline has been changed to serine (CSS-S), according to methods described in Example 13. This connecting region is attached to wild type human IgG1 CH2 and CH3 constant regions as described in Example 1. The polynucleotide sequence is provided in SEQ ID NO:______, and the encoded polypeptide sequence is provided in SEQ ID NO:______.

### Example 96

### G28-1 scFv V_{H} L11S(SCS-S)H WCH2 WCH3

[0761] This construct has a G28-1 (anti-CD37) single chain Fv binding region with a point mutation at amino acid residue 11 in the heavy chain variable region, where the leucine has been changed to a serine as described in Example 35. This binding region is attached to a mutant human IgG1 connecting region, where the first and third cysteines have been changed to serines and the proline has been changed to serine (SCS-S), according to methods described in Example 13. This connecting region is attached to wild type human IgG1 CH2 and CH3 constant regions as described in Example 1. The polynucleotide sequence is provided in SEQ ID NO:______, and the encoded polypeptide sequence is provided in SEQ ID NO:______.

### Example 97

### G28-1 scFv V_{H} L11S(CCS-P)H WCH2 WCH3

[0762] This construct has a G28-1 (anti-CD37) single chain Fv binding region with a point mutation at amino acid residue 11 in the heavy chain variable region, where the leucine has been changed to a serine as described in Example 35. This binding region is attached to a mutant human IgG1 connecting region, where third cysteine has been changed to a serine (CCS-P), according to methods described in Example 22. This connecting region is attached to wild type human IgG1 CH2 and CH3 constant regions as described in Example 1. The polynucleotide sequence is provided in SEQ ID NO:______, and the encoded polypeptide sequence is provided in SEQ ID NO:______.

### Example 98

### G28-1 scFv V_{H} L11S(SCC-P)H WCH2 WCH3

[0763] This construct has a G28-1 (anti-CD37) single chain Fv binding region with a point mutation at amino acid residue 11 in the heavy chain variable region, where the leucine has been changed to a serine as described in Example 35. This binding region is attached to a mutant human IgG1 connecting region, where first cysteine has been changed to a serine (SCC-P), according to methods described in Example 32. This connecting region is attached to wild type human IgG1 CH2 and CH3 constant regions as described in Example 1. The polynucleotide sequence is provided in SEQ ID NO:______, and the encoded polypeptide sequence is provided in SEQ ID NO:______.

### Example 99

### G28-1 scFv V_{H} L11S mIgE CH2 CH3 CH4

[0764] This construct has a G28-1 (anti-CD37) single chain Fv binding region with a point mutation at amino acid residue 11 in the heavy chain variable region, where the leucine has been changed to a serine as described in Example 35. This binding region is attached to a wilt type mouse IgE CH2 CH3 and CH4 region using methods described in Example 39. The polynucleotide sequence is provided in SEQ ID NO:______, and the encoded polypeptide sequence is provided in SEQ ID NO:______.

### Example 100

### G28-1 scFv VH L11S mIgAH WIgACH2 T4CH3

[0765] This construct has a G28-1 (anti-CD37) single chain Fv binding region with a point mutation at amino acid residue 11 in the heavy chain variable region, where the leucine has been changed to a serine as described in Example 35. This binding region is attached to a connecting region from mouse IgA as described in Example 39. This connecting region is attached to a mouse IgA constant region consisting of a wild type CH2 region and a mutated CH3 region where there is a 4 amino acid truncation at residues as described in Example 39. The polynucleotide sequence is provided in SEQ ID NO:______, and the encoded polypeptide sequence is provided in SEQ ID NO:______.

### Example 101

### G28-1 scFv V_{H} L11S hIgE CH2 CH3 CH4

[0766] This construct has a G28-1 (anti-CD37) single chain Fv binding region with a point mutation at amino acid residue 11 in the heavy chain variable region, where the leucine has been changed to a serine as described in Example 35. This binding region is attached to a wild type human IgE constant region containing CH2, CH3 and CH4 as described in Example 38. The polynucleotide sequence is provided in SEQ ID NO:______, and the encoded polypeptide sequence is provided in SEQ ID NO:______.

### Example 102

### G28-1 scFv V_{H} L11S hIgAH WIgACH2 T4CH3

[0767] This construct has a G28-1 (anti-CD37) single chain Fv binding region with a point mutation at amino acid residue 11 in the heavy chain variable region, where the leucine has been changed to a serine as described in Example 35. This binding region is attached to a connecting region from human IgA as described in Example 5. This connecting region is attached to a human IgA constant region consisting of a wild type CH2 region and a mutated CH3 region where there is a truncation of 4 amino acid residues prior to the 3′ stop codon as described in Example 13. The polynucleotide sequence is provided in SEQ ID NO:______, and the encoded polypeptide sequence is provided in SEQ ID NO:______.

### Example 103

### HD37 scFv IgAH WCH2 WCH3

[0768] The HD37 scFv was cloned from the HD37 hybridoma using the Novagen-Ig family primer sets, TOPO cloning and sequencing and sewing PCR assay. For the initial PCR reactions prior to sewing, the TOPO clone templates HD37 VH C-1 and HD37 KVL B-9 were used at 1:100 with an amplification profile of 94 C 30 sec; 55 C, 30 sec; 72 C, 30 seconds for 25 cycles. To provide templates for the secondary SEWING PCR reactions, primary reaction products were gel purified, QIAQUICK purified, and the eluates diluted 50 fold. One microliter each V_{L} and VH overlapping templates were added to PCR reactions with the following amplification profile: 94 C, 60 sec; 55 C, 60 sec; 72 C, 60 sec; for 30 cycles. After two cycles, the machine was paused, and the flanking 5′V_{L} and 3′VH primers were added to the reactions at 25 pmol each, and the PCR reactions resumed. PCR products were checked on a gel for the presence of an 750-800 bp fragment, and the reactions products QIAQUICK purified and digested with the appropriate restriction enzymes for insertion into pD 18 Ig expression vectors.

[0769] PCR of V_{L} domain with native leader peptide and part of glyser linker:

| | | |
|---|---|---|
| 5′ primer: | 5′-gttgttaagcttgccgccatggagacagacacactcctgctatgg-3′ | (SEQ ID NO ) |
| 3′ primer: | 5′ gccacccgacccaccaccgcccgagccaccgccacctttgatttccagcttggtgcctcc-3′ | (SEQ ID NO ) |

[0770] PCR of VL domain without leader peptide (SalI site) and part of glyser linker:

| 5′ primer: | 5′-gttgttgtcgacattgtgctgacccaatctcca-3′ | (SEQ ID NO ) |
|---|---|---|
| 3′ priemr: | 5′-gccacccgacccaccaccgcccgagccaccgccacctttgatttccagcttggtgcctcc-3′ | (SEQ ID NO ) |
| PCR of VH domain with part of glyser linker and BclI site for fusion to −Ig | | |
| tails. | | |
| 5′ primer: | 5′-tcgggcggtggtgggtcgggtggcggcggatcgtcacaggttcagctgcagcagtctgg-3′ | (SEQ ID NO) |
| 3′ primer: | 5′-tcagtgctgatcagaggagacggtgactgaggttccttg-3′ | (SEQ ID NO ) |

[0771] This binding region is connected to a wild type human IgA connecting region and wild type human IgG CH2 and CH3 constant regions as described in Example 5. This connecting region is attached to wild type human IgG1 CH2 and CH3 constant regions as described in Example 1. This construct has previously been referred to as HD37 scFv-IgAHWTG1C and HD37-IgAHWTG1C, which both have the same sequence as the above construct. The polynucleotide sequence is provided in SEQ ID NO:______, and the encoded polypeptide sequence is provided in SEQ ID NO:______.

### Example 104

### HD37 scFv (SSS-S)H WCH2 WCH3

[0772] This construct has a HD 37 single chain Fv as described in Example 103. This binding region is connected to a mutated human IgG1 connecting region where all of the cysteines and one proline have been changed to serines (SSS-S) according to methods described in Example 5. This connecting region is attached to wild type human IgG1 CH2 and CH3 constant regions as described in Example 1. This construct has previously been referred to as HD37-MHWTG1C and HD37 scFv-IgMHWTG1C, which both have the same sequence as the above construct. The polynucleotide sequence is provided in SEQ ID NO:______, and the encoded polypeptide sequence is provided in SEQ ID NO:______.

### Example 105

### HD37 scFv V_{H} L11S(SSS-S)H WCH2 WCH3

[0773] This construct has a HD 37 single chain Fv with a mutation in the heavy chain variable region at amino acid residue 11, where leucine has been changed to serine according to the methods described in Example 50. This binding region is connected to a mutated human IgG1 connecting region where all of the cysteines and one proline have been changed to serines (SSS-S) according to methods described in Example 5. This connecting region is attached to wild type human IgG1 CH2 and CH3 constant regions as described in Example 1. The polynucleotide sequence is provided in SEQ ID NO:______, and the encoded polypeptide sequence is provided in SEQ ID NO:______.

### Example 106

### L6 scFv IgAH WCH2 WCH3

[0774] The L6 scFv was cloned from the L6 hybridoma (1Hellstrom) using the anchor-tailing method described in the Tissue Antigens Paper from 1996. The PCR profile was 94 C, 1 min; 50 C, 2 min; 72 C, 2 min; for 35 cycles. Once consensus sequence was obtained for VL and VH regions from at least 4 TOPO clones, primers were ordered for PCR reactions prior to SEWING PCR reactions as follows: For the initial PCR reactions prior to sewing, the TOPO cloned templates L6VK and L6V_{H} were used at 1:100 with an amplification profile of 94 C 30 sec; 55 C, 30 sec; 72 C, 30 seconds for 25 cycles. To provide templates for the secondary SEWING PCR reactions, primary reaction products were gel purified, QIAQUICK purified, and the eluates diluted 50 fold. One microliter each V_{L} and VH overlapping templates were added to PCR reactions with the following amplification profile: 94 C, 60 sec; 55 C, 60 sec; 72 C, 60 sec; for 30 cycles. After two cycles, the machine was paused, and the flanking 5′V_{L} and 3′VH primers were added to the reactions at 25 pmol each, and the PCR reactions resumed. PCR products were checked on a gel for the presence of an 750-800 bp fragment, and the reactions products QIAQUICK purified and digested with the appropriate restriction enzymes for insertion into pD18 Ig expression vectors.

[0775] PCR of V_{L} domain with native leader peptide and part of glyser linker:

| | | |
|---|---|---|
| L6VLHindIII: | 5′-gttgttaagcttgccgccatggattttcaagtgcagattttcagcttc-3′ | (SEQ ID NO ) |
| L6VLLK3: | 5′-gccacccgacccaccaccgcccgagccaccgccaccagagagctctttcagctccagcttggt-3′ | (SEQ ID NO ) |

[0776] PCR of VL domain without leader peptide (SalI site) and part of glyser linker:

| | | |
|---|---|---|
| 5′ primer: | 5′-gttgttgtcgacattgttctctcccagtctccagcaatcctgtctg-3′ | (SEQ ID NO ) |
| 3′ primer: | 5′-gccacccgacccaccaccgcccgagccaccgccaccagagagctctttcagctccagcttggt-3′ | (SEQ ID NO ) |

[0777] PCR of V_{H} domain with part of glyser linker and BclI site for fusion to −Ig tails.

| | | |
|---|---|---|
| 5′: | 5′-tcgggcggtggtgggtcgggtggcggcggatctctgcagatccagttggtgcagtct-3′ | (SEQ ID NO ) |
| 3′Bcl: | 5′-tcagtgctgatcagaggagactgtgagagtggtgccttg-3′ | (SEQ ID NO ) |

[0778] This binding region is connected to a human IgA connecting region and wild type human IgG1 CH2 and CH3 constant regions as described in Example 5. This connecting region is attached to wild type human IgG1 CH2 and CH3 constant regions as described in Example 1. This construct has previously been referred to as L6 scFv-IgAHWTG1C, which HAS the same sequence as the above construct. The polynucleotide sequence is provided in SEQ ID NO:______, and the encoded polypeptide sequence is provided in SEQ ID NO:______.

### Example 107

### L6 scFv VHL11S(SSS-S)H WCH2 WCH3

[0779] This construct has a L6 single chain Fv with a mutation in the heavy chain variable region at amino acid residue 11, where leucine has been changed to serine according to the methods described in Example 49. This binding region is connected to a mutated human IgG1 connecting region where all of the cysteines and one proline have been changed to serines (SSS-S) according to methods described in Example 5. This connecting region is attached to wild type human IgG1 CH2 and CH3 constant regions as described in Example 1. The polynucleotide sequence is provided in SEQ ID NO:______, and the encoded polypeptide sequence is provided in SEQ ID NO:

### Example 108

### 2H7 scFv-Llama IgG1

[0780] This construct has a 2H7 (anti-CD20) single chain Fv binding region as described in Example 1. This binding region is attached to a llama IgG1 hinge, CH2 and CH3 regions according to the methods described in Example 10. The polynucleotide sequence is provided in SEQ ID NO:______, and the encoded polypeptide sequence is provided in SEQ ID NO:______.

### Example 109

### 2H7 scFv-Llama IgG2

[0781] This construct has a 2H7 (anti-CD20) single chain Fv binding region as described in Example 1. This binding region is attached to a llama IgG2 hinge, CH2 and CH3 regions according to the methods described in Example 10. The polynucleotide sequence is provided in SEQ ID NO:______, and the encoded polypeptide sequence is provided in SEQ ID NO:______.

### Example 110

### 2H7 scFv-Llama IgG3

[0782] This construct has a 2H7 (anti-CD20) single chain Fv binding region as described in Example 1. This binding region is attached to a llama IgG3 hinge, CH2 and CH3 regions according to the methods described in Example 10. The polynucleotide sequence is provided in SEQ ID NO:______, and the encoded polypeptide sequence is provided in SEQ ID NO:______.

### Example 111

### CD16 Low (ED)(SSS-S)H P238SCH2 WCH3

[0783] This construct has the extra cellular, CD16 low affinity allele binding domain as described in Example 43. This binding region is connected to a mutated human IgG1 connecting region where all of the cysteines and one proline have been changed to serines (SSS-S) according to methods described in Example 5. This hinge region is attached to a mutated human IgG1 CH2 region and a wild type human IgG1 CH3 region. The P238S mutation, where a proline at residue 238 was changed to a serine, was introduced according to methods described in Example 70. The polynucleotide sequence is provided in SEQ ID NO:______, and the encoded polypeptide sequence is provided in SEQ ID NO:______.

### Example 112

### CD16-9 HIGH (ED)(SSS-S)H P238SCH2 WCH3

[0784] This construct has the extra cellular, CD16 high affinity allele binding domain as described in Example 43. This binding region is connected to a mutated human IgG1 connecting region where all of the cysteines and one proline have been changed to serines (SSS-S) according to methods described in Example 5. This hinge region is attached to a mutated human IgG1 CH2 region and a wild type human IgG1 CH3 region. The P238S mutation, where a proline at residue 238 was changed to a serine, was introduced according to methods desribed in Example 70. The polynucleotide sequence is provided in SEQ ID NO:______, and the encoded polypeptide sequence is provided in SEQ ID NO:______.

### Example 113

### 2e12 scFv (SSS-S)H P238SCH2 WCH3-hCD80TM/CT

[0785] This construct has a 2e12 (anti-CD28) single chain Fv binding region described in Example 12. This binding region is connected to a mutated human IgG1 connecting region where all of the cysteines and one proline have been changed to serines (SSS-S) according to methods described in Example 5. This connecting region is attached to a mutated human IgG1 CH2 region and a wild type human IgG1 CH3 region. The P238S mutation, where a proline at residue 238 was changed to a serine, was introduced according to methods described in Example 70. The CH3 region is attached to a human CD80 transmembrane and cytoplasmic tail region (hCD80 TM/CT). The hCD80 TM/CT was cloned using random primed cDNA derived from the BJAB cell line according to methods described in Example 12. This TM/CT region was attached to a Ig CH3 region with an open reading frame (ORF). Open reading frame versions of scFvIg constructs of interest were created by replacement of the soluble versions of each −Ig tail with ORF (open reading frame versions) of these tails. PCR primers were designed for the existing clones of soluble −Ig tails which delete the stop codon and add one or more restriction sites to the 3′ end of the new −Ig cassettes. The desired transmembrane and cytoplasmic tail sequences can then be subcloned downstream of these new −Ig cassettes. Each construct utilized the existing available 5′ BCLI oligonucleotide used in amplifying the soluble version of the tails for the PCR reactions. The 3′ oligonucleotides replace the stop codon with out of frame restriction sites fused to the coding region for protein domains involved in regulation of apoptosis.

[0786] The PCR amplifications were carried out with 25 pmol of each primer, standard PCR reagents, and varying volumes of either cloned domains or cDNA obtained from PBMC, spleen, or thymus RNA. The reactions used a cycling profile of 94 C, 60sec; 55 C, 60 sec; 72 C, 2 min, for 35 cycles. The primers for the IgG ORF are listed below.

| | | |
|---|---|---|
| 5′ primer: | 5′-gttgtagatcaggagcccaaatcttctgacaaaactcacacatctccaccgtccccagcacctgaactcctggg | (SEQ ID NO ) |
| | ggaccgtcagtcttcc-3′ | |
| 3′ primer: | 5′-gttgttttcgaaggatccgctttacccgggagcagggagaggctcttctgcgtgtagtg-3′ | (SEQ ID NO ) |

[0787] The polynucleotide sequence is provided in SEQ ID NO:______, and the encoded polypeptide sequence is provided in SEQ ID NO:______.

### Example 114

### 10A8 scFv (SSS-S)H P238SCH2 WCH3—hCD80TM/CT

[0788] This construct has a 10A8 (anti-CD2152) single chain Fv binding region described in Example 12. This binding region is connected to a mutated human IgG1 connecting region where all of the cysteines and one proline have been changed to serines (SSS-S) according to methods described in Example 5. This hinge region is attached to a mutated human IgG1 CH2 region and a wild type human IgG1 CH3 region. The P238S mutation, where a proline at residue 238 was changed to a serine, was introduced according to methods described in Example 70. This CH3 region is attached to a hCD80 TM/CT according to methods described in Example 113. The polynucleotide sequence is provided in SEQ ID NO:______, and the encoded polypeptide sequence is provided in SEQ ID NO:______.

### Example 115

### 40.2.220 scFv (SSS-S)H P238SCH2 WCH3—HCD80TM/CT

[0789] This construct has a 40.2.220 (anti-CD40) single chain Fv binding region described in Example 12. This binding region is connected to a mutated human IgG1 connecting region where all of the cysteines and one proline have been changed to serines (SSS-S) according to methods described in Example 5. This hinge region is attached to a mutated human IgG1 CH2 region and a wild type human IgG1 CH3 region. The P238S mutation, where a proline at residue 238 was changed to a serine, was introduced according to methods described in Example 70. This CH3 region is attached to a hCD80 TM/CT according to methods described in Example 113. The polynucleotide sequence is provided in SEQ ID NO:______, and the encoded polypeptide sequence is provided in SEQ ID NO:______.

### Example 116

### 2H7 scFv (SSS-S)H P238SCH2 WCH3—hCD80TM/CT

[0790] This construct has a 2H7 (anti-CD20) single chain Fv binding region as described in Example 1. This binding region is connected to a mutated human IgG1 connecting region where all of the cysteines and one proline have been changed to serines (SSS-S), according to methods described in Example 5. This hinge region is attached to a mutated human IgG1 CH2 region and a wild type human IgG1 CH3 region. The P238S mutation, where a proline at residue 238 was changed to a serine, was introduced according to methods described in Example 70. This CH3 region is attached to a hCD80 TM/CT according to methods described in Example 113. This construct has previously been referred to as: The polynucleotide sequence is provided in SEQ ID NO:______, and the encoded polypeptide sequence is provided in SEQ ID NO:______.

### Example 117

### G19-4 scFv (SSS-S)H P238SCH2 WCH3—hCD80TM/CT

[0791] This construct has a GI 9 (anti-CD3) single chain Fv binding region described in Example 29. This binding region is connected to a mutated human IgG1 connecting region where all of the cysteines and one proline have been changed to serines (SSS-S) according to methods described in Example 5. This hinge region is attached to a mutated human IgG1 CH2 region and a wild type human IgG1 CH3 region. The P238S mutation, where a proline at residue 238 was changed to a serine, was introduced according to methods described in Example 70. This CH3 region is attached to a hCD80 TM/CT according to methods described in Example 113. The polynucleotide sequence is provided in SEQ ID NO:______, and the encoded polypeptide sequence is provided in SEQ ID NO:______.

### Example 118

### 2E12 scFv (SSS-S)H WCH2 WCH3—hCD80TM/CT

[0792] This construct has a 2e12 (anti-CD28) single chain Fv binding region described in Example 12. This binding region is connected to a mutated human IgG1 connecting region where all of the cysteines and one proline have been changed to serines (SSS-S) according to methods described in Example 5. This connecting region is attached to wild type human IgG1 CH2 and CH3 constant regions as described in Example 1. This CH3 region is attached to a hCD80 TM/CT according to methods described in Example 113. This construct has previously been referred to as 2e12 scFv IgG WTH WHTCH3CH2-CD80, which has the same sequence as the above construct. The polynucleotide sequence is provided in SEQ ID NO:______, and the encoded polypeptide sequence is provided in SEQ ID NO:______.

### Example 119

### 2E12 scFv IgAH IgACH2 T4CH3—hCD80TM/CT

[0793] This construct has a 2l12 (anti-CD28) single chain Fv binding region described in Example 12. This binding region is attached to a connecting region from human IgA as desribed in Example 5. This connecting region is attached to a human IgA constant region consisting of a wild type CH2 region and a mutated CH3 region where there is a truncation of 4 amino acid residues prior to the 3′ stop codon as described in example 13. This CH3 region is attached to a hCD80 TM/CT according to methods described in Example 113. The specific primers used to create an IgA ORF are listed below.

(SEQ ID NO )

5′ primer:
5′-gttgttgatcagccagttccctcaactccacctacc-3′

(SEQ ID NO )

3′ primer:
5′-gttgttttcgaaggatccgcgtccacctccgccatgacaacaga

[0794] The polynucleotide sequence is provided in SEQ ID NO:______, and the encoded polypeptide sequence is provided in SEQ ID NO:______.

### Example 120

### 2e12 scFv IgE CH2CH3CH4—hCD80TM/CT

[0795] This construct has a 2e 12 (anti-CD28) single chain Fv binding region described in Example 12. This binding region is attached to a human IgE constant region containing CH2, CH3 and CH4 as described in Example 38. This CH4 region is attached to a hCD80 TM/CT essentially according to methods described in Example 113. The specific primers used to create an IgE ORF are listed below.

(SEQ ID NO )

5′ primer:
5′-gttgttgatcacgtctgctccagggacttcacc-3′

(SEQ ID NO )

3′ primer:
5′-
gttgttttcgaaggatccgctttaccagatttacagacaccgctcgctg-
3′

[0796] The polynucleotide sequence is provided in SEQ ID NO:______, and the encoded polypeptide sequence is provided in SEQ ID NO:______.

### Example 121

### 2e12 scFv (SSS-S)H P238SCH2 WCH3—mFADD-TM/CT

[0797] This construct has a 2e12 (anti-CD28) single chain Fv binding region described in Example 12. This binding region is connected to a mutated human IgG1 connecting region where all of the cysteines and one proline have been changed to serines (SSS-S) according to methods described in Example 5. This hinge region is attached to a mutated human IgG1 CH2 region and a wild type human IgG1 CH3 region. The P238S mutation, where a proline at residue 238 was changed to a serine, was introduced according to methods described in Example 70. The CH3 region is attached to a mouse FADD transmembrane ans cytoplasmic tail region (mFADD TM/CT). This region is cloned using essentially the same methods described in Example 113. The domain was PCR amplified from randomly primed cDNA from mouse spleen RNA. The specific primers are listed below.

(SEQ ID NO )

5′ primer:
5′-
gttgtggatccttcgaacccattcctggtgctgctgcactcgctg-3′

(SEQ ID NO )

3′ primer:
5′-
gttgttatcgatctcgagtcagggtgtttctgaggaagacacagt-3′

[0798] The specific primers used to create a mouse IgG ORF are listed below.

| | | |
|---|---|---|
| 5′primer: | 5′-gttgtagatctggagcccagagggcccacaatcaagccctctcctccaagcaaaagccca-3′ | (SEQ ID NO ) |
| 3′primer: | 5′-gttgttttcgaaggatccgctttacccggagtccgggagaag-3′ | (SEQ ID NO ) |

[0799] The polynucleotide sequence is provided in SEQ ID NO:______, and the encoded polypeptide sequence is provided in SEQ ID NO:______.

### Example 122

### 2E12 scFv (SSS-S)H WCH2 WCH3—mFADD-TM/CT

[0800] This construct has a 2e12 (anti-CD28) single chain Fv binding region described in Example 12. This binding region is connected to a mutated human IgG1 connecting region where all of the cysteines and one proline have been changed to serines (SSS-S) according to methods described in Example 5. This connecting region is attached to wild type human IgG1 CH2 and CH3 constant regions as described in Example 1. The CH3 region was attached to a mFADD TM/TM region according to methods described in Example 113 and 121. The polynucleotide sequence is provided in SEQ ID NO:______, and the encoded polypeptide sequence is provided in SEQ ID NO:______.

### Example 123

### 2e12 scFv (SSS-S)H WCH2 WCH3—mcasp3-TM/CT

[0801] This construct has a 2e 12 (anti-CD28) single chain Fv binding region described in Example 12. This binding region is connected to a mutated human IgG1 connecting region where all of the cysteines and one proline have been changed to serines (SSS-S) according to methods described in Example 5. This connecting region is attached to wild type human IgG1 CH2 and CH3 constant regions as described in Example 1. The CH3 region is attached to a mouse casp3 transmembrane and ctyoplasmic tail region according to methods described in Examples 113 and 121. The specific primers used to isolate the mcasp3 TM/CT region are listed below:

(SEQ ID NO )

5′primer:
5′-
gttgttggatccttcgaacatggagaacaacaaaacctcagtggattca-
3′

(SEQ ID NO )

3′primer:
5′-gttgttatcgatctcgagctagtgataaaagtacagttctttcgt-
3′

[0802] The polynucleotide sequence is provided in SEQ ID NO:______, and the encoded polypeptide sequence is provided in SEQ ID NO:______.

### Example 124

### 2e12 scFv (SSS-S)H P238SCH2 WCH3—mcasp3-TM/CT

[0803] This construct has a 2e12 (anti-CD28) single chain Fv binding region described in Example 12. This binding region is connected to a mutated human IgG1 connecting region where all of the cysteines and one proline have been changed to serines (SSS-S) according to methods described in Example 5. This hinge region is attached to a mutated human IgG1 CH2 region and a wild type human IgG1 CH3 region. The P238S mutation, where a proline at residue 238 was changed to a serine, was introduced according to methods described in Example 70. The CH3 region is connected to a mcasp3 TM/CT region according to methods described in Examples 113, 121 and 123. The polynucleotide sequence is provided in SEQ ID NO:______, and the encoded polypeptide sequence is provided in SEQ ID NO:______.

### Example 125

### 2e12 scFv (SSS-S)H WCH2 WCH3—mcasp8-TM/CT

[0804] This construct has a 2e12 (anti-CD28) single chain Fv binding region described in Example 12. This binding region is connected to a mutated human IgG1 connecting region where all of the cysteines and one proline have been changed to serines (SSS-S) according to methods described in Example 5. This connecting region is attached to wild type human IgG1 CH2 and CH3 constant regions as described in Example 1. The CH3 region is attached to a mouse casp8 transmemebrane and cytoplasmic tail region (mcasp8 TM/CT) essentially according to methods described in Example 113 and 121. The specific primers used to clone the mcasp8 TM/CT region are listed below.

(SEQ ID NO )

5′ primer:
5′-gttgtttcgaacatggatttccagagttgtctttatgctattgctg-
3′

(SEQ ID NO )

3′ primer:
5′-
gttgttatcgatctcgagtcattagggagggaagaagagcttcttccg-
3′

[0805] The polynucleotide sequence is provided in SEQ ID NO:______, and the encoded polypeptide sequence is provided in SEQ ID NO:______.

### Example 126

### 2E12 scFv (SSS-S)H P238SCH2 WCH3—mcasp8-TM/CT

[0806] This construct has a 2e12 (anti-CD28) single chain Fv binding region described in Example 12. This binding region is connected to a mutated human IgG1 connecting region where all of the cysteines and one proline have been changed to serines (SSS-S) according to methods described in Example 5. This hinge region is attached to a mutated human IgG1 CH2 region and a wild type human IgG1 CH3 region. The P238S mutation, where a proline at residue 238 was changed to a serine, was introduced according to methods described in Example 70. The CH3 region was attached to a mcasp8 TM/CT region according to methods described in Examples 113, 121 and 125. The polynucleotide sequence is provided in SEQ ID NO:______, and the encoded polypeptide sequence is provided in SEQ ID NO:______.

### Example 127

### 2e12 scFv (SSS-S)H WCH2 WCH3—hcasp3-TM/CT

[0807] This construct has a 2e12 (anti-CD28) single chain Fv binding region described in Example 12. This binding region is connected to a mutated human IgG1 connecting region where all of the cysteines and one proline have been changed to serines (SSS-S) according to methods described in Example 5. This connecting region is attached to wild type human IgG1 CH2 and CH3 constant regions as described in Example 1. The CH3 region was attached to a human casp3 transmembrane and cytoplasmic tail region (hcasp3 TM/CT) essentially according to methods describe in Examples 113. The specific primers used to clone the hcasp3 TM/CT region are listed below.

(SEQ ID NO )

5′ Primer:
5′-gttgtggatccttcgaacatggagaacactgaaaactcagtggat-
3′

(SEQ ID NO )

3′ Primer:
5′-
gttgttatcgatctcgagttagtgataaaaatagagttcttttgtgag-
3′

[0808] The polynucleotide sequence is provided in SEQ ID NO:______, and the encoded polypeptide sequence is provided in SEQ ID NO:______.

### Example 128

### 2e12 scFv (SSS-S)H P238SCH2 WCH3—hcasp3-TM/CT

[0809] This construct has a 2e12 (anti-CD28) single chain Fv binding region described in Example 12. This binding region is connected to a mutated human IgG1 connecting region where all of the cysteines and one proline have been changed to serines (SSS-S) according to methods described in Example 5. This hinge region is attached to a mutated human IgG1 CH2 region and a wild type human IgG1 CH3 region. The P238S mutation, where a proline at residue 238 was changed to a serine, was introduced according to methods described in Example 70. The CH3 region is attached to a hcasp3 TM/CT region according to methods described in Examples 113 and 127. The polynucleotide sequence is provided in SEQ ID NO:______, and the encoded polypeptide sequence is provided in SEQ ID NO:______.

### Example 129

[0810] 2e12 scFv (SSS-S)H WCH2 WCH3—hcasp8-TM/CT

[0811] This construct has a 2e12 (anti-CD28) single chain Fv binding region described in Example 12. This binding region is connected to a mutated human IgG1 connecting region where all of the cysteines and one proline have been changed to serines (SSS-S) according to methods described in Example 5. This connecting region is attached to wild type human IgG1 CH2 and CH3 constant regions as described in Example 1. The CH3 region is attached to a human casp8 transmembrane and cytoplasmic tail region (hcasp8 TM/CT) according to methods described in Example 133. The specific primers used to clone the hcasp8 TM/CT region are listed below.

(SEQ ID NO )

5′ Primer:
5′-gttgtggatccttcgaacatggacttcagcagaaatctttatgat-
3′

(SEQ ID NO )

3′ Primer:
5′-
gttgttatcgatgcatgctcaatcagaagggaagacaagtttttttct-
3′

[0812] The polynucleotide sequence is provided in SEQ ID NO:______, and the encoded polypeptide sequence is provided in SEQ ID NO:______.

### Example 130

### 2e12 scFv (SSS-S)H P238SCH2 WCH3—hcasp8-TM/CT

[0813] This construct has a 2e12 (anti-CD28) single chain Fv binding region described in Example 12. This binding region is connected to a mutated human IgG1 connecting region where all of the cysteines and one proline have been changed to serines (SSS-S) according to methods described in Example 5. This hinge region is attached to a mutated human IgG1 CH2 region and a wild type human IgG1 CH3 region. The P238S mutation, where a proline at residue 238 was changed to a serine, was introduced according to methods described in Example 70. The CH3 region is attached to a hcasp8 TM/CT according to methods described in Examples 113 and 129. The polynucleotide sequence is provided in SEQ ID NO:______, and the encoded polypeptide sequence is provided in SEQ ID NO:______.

### Example 131

### 1D8 scFv (SSS-S)H P238SCH2 WCH3—hCD80TM/CT

[0814] This construct has a 1D8 (anti-4-1BB) single chain Fv binding region described in Example 25. This binding region is connected to a mutated human IgG1 connecting region where all of the cysteines and one proline have been changed to serines (SSS-S) according to methods described in Example 5. This hinge region is attached to a mutated human IgG1 CH2 region and a wild type human IgG1 CH3 region. The P238S mutation, where a proline at residue 238 was changed to a serine, was introduced according to methods described in Example 70. The CH3 region is attached to a hCD80 TM/CT region according to methods described in Example 113. The polynucleotide sequence is provided in SEQ ID NO:______, and the encoded polypeptide sequence is provided in SEQ ID NO:______.

### Example 132

### 1D8 scFv (SSS-S)H WCH2 WCH3—hCD80TM/CT

[0815] This construct has a 1D8 (anti-4-1BB) single chain Fv binding region described in Example 25. This binding region is connected to a mutated human IgG1 connecting region where all of the cysteines and one proline have been changed to serines (SSS-S) according to methods described in Example 5. This connecting region is attached to wild type human IgG1 CH2 and CH3 constant regions as described in Example 1. The CH3 region is attached to a hCD80 TM/CT region according to methods described in Example 113. This construct has previously been refered to as 1D8 scFv IgG WTH WTCH2CH3-CD80, which has the same sequence as the above construct. The polynucleotide sequence is provided in SEQ ID NO:______, and the encoded polypeptide sequence is provided in SEQ ID NO:______.

### Example 133

### 1D8 scFv-mIgAH WIgA CH2 T4CH3—hCD80TM/CT

[0816] This construct has a 1 D8 (anti-4-1 BB) single chain Fv binding region described in Example 25. This binding region is attached to a connecting region from human IgA as described in Example 5. This connecting region is attached to a mouse IgA constant region consisting of a wild type CH2 region and a mutated CH3 region where there is a truncation of 4 amino acid residues prior to the 3′ stop codon as described in Example 39. The CH3 region can be attached to a hCD80 TM/CT region according to methods described in Examples 113 using primers that create an IgA ORF.

### Example 134

### 1D8 scFv IgE CH2CH3CH4—hCD80TM/CT

[0817] This construct has a 1D8 (anti-4-1BB) single chain Fv binding region described in Example 25. This binding region is attached to a human IgE constant region containing CH2, CH3 and CH4 as described in Example 38. The CH4 region is attached to a hCD80 TM/CT according to methods described in Examples 113 and 120. The polynucleotide sequence is provided in SEQ ID NO:______, and the encoded polypeptide sequence is provided in SEQ ID NO:______.

### Example 135

### 1D8 scFv (SSS-S)H P238SCH2 WCH3—mFADD-TM/CT

[0818] This construct has a 1D8 (anti-4-1BB) single chain Fv binding region described in Example 25. This binding region is connected to a mutated human IgG1 connecting region where all of the cysteines and one proline have been changed to serines (SSS-S) according to methods described in Example 5. This hinge region is attached to a mutated human IgG1 CH2 region and a wild type human IgG1 CH3 region. The P238S mutation, where a proline at residue 238 was changed to a serine, was introduced according to methods described in Example 70. The CH3 region was attached to a mFADD TM/TM region according to methods described in Example 113 and 121. The polynucleotide sequence is provided in SEQ ID NO:______, and the encoded polypeptide sequence is provided in SEQ ID NO:______.

### Example 136

### 1DS scFv (SSS-S)H WCH2 WCH3—mFADD-TM/CT

[0819] This construct has a 1D8 (anti-4-1BB) single chain Fv binding region described in Example 25. This binding region is connected to a mutated human IgG1 connecting region where all of the cysteines and one proline have been changed to serines (SSS-S) according to methods described in Example 5. This connecting region is attached to wild type human IgG1 CH2 and CH3 constant regions as described in Example 1. The CH3 region was attached to a mFADD TM/TM region according to methods described in Example 113 and 121. The polynucleotide sequence is provided in SEQ ID NO:______, and the encoded polypeptide sequence is provided in SEQ ID NO:______.

### Example 137

### 1D8 scFv (SSS-S)H WCH2 WCH3—mcasp3-TM/CT

[0820] This construct has a 1D8 (anti-4-1BB) single chain Fv binding region described in Example 25. This binding region is connected to a mutated human IgG1 connecting region where all of the cysteines and one proline have been changed to serines (SSS-S) according to methods described in Example 5. This connecting region is attached to wild type human IgG1 CH2 and CH3 constant regions as described in Example 1. The CH3 region was attached to a mcasp3 TM/TM region according to methods described in Example 113, 121 and 123. The polynucleotide sequence is provided in SEQ ID NO:______, and the encoded polypeptide sequence is provided in SEQ ID NO:______.

### Example 138

### 1D8 scFv (SSS-S)H P238SCH2 WCH3—mcasp3-TM/CT

[0821] This construct has a 1 D8 (anti-4-1 BB) single chain Fv binding region described in Example 25. This binding region is connected to a mutated human IgG1 connecting region where all of the cysteines and one proline have been changed to serines (SSS-S) according to methods described in Example 5. This hinge region is attached to a mutated human IgG1 CH2 region and a wild type human IgG1 CH3 region. The P238S mutation, where a proline at residue 238 was changed to a serine, was introduced according to methods described in Example 70. The CH3 region was attached to a mcasp3 TM/TM region according to methods described in Example 113, 121 and 123. The polynucleotide sequence is provided in SEQ ID NO:______, and the encoded polypeptide sequence is provided in SEQ ID NO:______.

### Example 139

### 1D8 scFv (SSS-S)H WCH2 WCH3—mcasp8-TM/CT

[0822] This construct has a 1D8 (anti-4-1BB) single chain Fv binding region described in Example 25. This binding region is connected to a mutated human IgG1 connecting region where all of the cysteines and one proline have been changed to serines (SSS-S) according to methods described in Example 5. This connecting region is attached to wild type human IgG1 CH2 and CH3 constant regions as described in Example 1. The CH3 region was attached to a mcasp8 TM/TM region according to methods described in Example 113, 121 and 125. The polynucleotide sequence is provided in SEQ ID NO:______, and the encoded polypeptide sequence is provided in SEQ ID NO:______.

### Example 140

### 1D8 scFv (SSS-S)H P238SCH2 WCH3—mcasp8-TM/CT

[0823] This construct has a 1 D8 (anti-4-1 BB) single chain Fv binding region described in Example 25. This binding region is connected to a mutated human IgG1 connecting region where all of the cysteines and one proline have been changed to serines (SSS-S) according to methods described in Example 5. This hinge region is attached to a mutated human IgG1 CH2 region and a wild type human IgG1 CH3 region. The P238S mutation, where a proline at residue 238 was changed to a serine, was introduced according to methods described in Example 70. The CH3 region was attached to a mcasp8 TM/TM region according to methods described in Example 113, 121 and 125. The polynucleotide sequence is provided in SEQ ID NO:______, and the encoded polypeptide sequence is provided in SEQ ID NO:______.

### Example 141

### 1D8 scFv (SSS-S)H WCH2 WCH3—HCASP3-TM/CT

[0824] This construct has a 1D8 (anti-4-1BB) single chain Fv binding region described in Example 25. This binding region is connected to a mutated human IgG1 connecting region where all of the cysteines and one proline have been changed to serines (SSS-S) according to methods described in Example 5. This connecting region is attached to wild type human IgG1 CH2 and CH3 constant regions as described in Example 1. The CH3 region is attached to a hcasp3 TM/CT according to methods described in Examples 113 and 127. The polynucleotide sequence is provided in SEQ ID NO:______, and the encoded polypeptide sequence is provided in SEQ ID NO:______.

### Example 142

### 1D8 scFv (SSS-S)H P238SCH2 WCH3—hcasp3-TM/CT

[0825] This construct has a 1 D8 (anti-4-1 BB) single chain Fv binding region described in Example 25. This binding region is connected to a mutated human IgG1 connecting region where all of the cysteines and one proline have been changed to serines (SSS-S) according to methods described in Example 5. This hinge region is attached to a mutated human IgG1 CH2 region and a wild type human IgG1 CH3 region. The P238S mutation, where a proline at residue 238 was changed to a serine, was introduced according to methods described in Example 70. The CH3 region is attached to a hcasp3 TM/CT according to methods described in Examples 113 and 127. The polynucleotide sequence is provided in SEQ ID NO:______, and the encoded polypeptide sequence is provided in SEQ ID NO:______.

### Example 143

### 1D8 scFv (SSS-S)H WCH2 WCH3—Hcasp8-TM/CT

[0826] This construct has a 1D8 (anti-4-1BB) single chain Fv binding region described in Example 25. This binding region is connected to a mutated human IgG1 connecting region where all of the cysteines and one proline have been changed to serines (SSS-S) according to methods described in Example 5. This connecting region is attached to wild type human IgG1 CH2 and CH3 constant regions as described in Example 1. The CH3 region is attached to a hcasp8 TM/CT according to methods described in Examples 113 and 129. The polynucleotide sequence is provided in SEQ ID NO:______, and the encoded polypeptide sequence is provided in SEQ ID NO:______.

### Example 144

### 1D8 scFv (SSS-s)H P238SCH2 WCH3—hcasp8-TM/CT

[0827] This construct has a 1D8 (anti-4-1BB) single chain Fv binding region described in Example 25. This binding region is connected to a mutated human IgG1 connecting region where all of the cysteines and one proline have been changed to serines (SSS-S) according to methods described in Example 5. This hinge region is attached to a mutated human IgG1 CH2 region and a wild type human IgG1 CH3 region. The P238S mutation, where a proline at residue 238 was changed to a serine, was introduced according to methods described in Example 70. The CH3 region is attached to a hcasp8 TM/CT according to methods described in Examples 113 and 129. The polynucleotide sequence is provided in SEQ ID NO:______, and the encoded polypeptide sequence is provided in SEQ ID NO:______.

### Example 145

### L6 scFv (SSS-S)H WCH2 WCH3

[0828] This construct has a L6 scFv binding domain as described in Example 105. This binding region is connected to a mutated human IgG1 connecting region where all of the cysteines and one proline have been changed to serines (SSS-S) according to methods described in Example 5. This connecting region is attached to wild type human IgG1 CH2 and CH3 constant regions as described in Example 1. This construct has previously been refered to as L6 scFv-IgMHWTG1C, which has the same sequence as the above construct. The polynucleotide sequence is provided in SEQ ID NO:______, and the encoded polypeptide sequence is provided in SEQ ID NO:______.

### Example 146

### 2H7 scFv CD154 (L2)

[0829] This construct has a 2H7 (anti-CD20) single chain Fv binding region as described in Example 1. This binding region has been attached to CD154 extracellular domain according to methods described in Example 4. The polynucleotide sequence is provided in SEQ ID NO:______, and the encoded polypeptide sequence is provided in SEQ ID NO:______.

### Example 147

### 2H7 scFv CD154 (S4)

[0830] This construct has a 2H7 (anti-CD20) single chain Fv binding region as described in Example 1. This binding region has been attached to CD154 extracellular domain according to methods described in Example 4, such that methods of attachment resulted in a truncated version compared to the construct describe in Example 146. The polynucleotide sequence is provided in SEQ ID NO:______, and the encoded polypeptide sequence is provided in SEQ ID NO:______.

### Example 148

### CTLA4 IgAH IgACH2CH3

[0831] This construct has the extra cellular CTLA-4 binding region as described in Example 14. This binding region is attached to a wild type human IgA connecting region as described in Example 5. This connecting region is attached to a wild type human IgA CH2 and CH3 constant region according to methods described in Example 13. This constant region is attached to a J-chain region as described in Example 13. This construct has previously been refered to as CTLA-4 IgAH IgACH2CH3, which has the same sequence as the above construct. The polynucleotide sequence is provided in SEQ ID NO:______, and the encoded polypeptide sequence is provided in SEQ ID NO:______.

### Example 149

### CTLA4 IgAH IgACH2 T4CH3

[0832] This construct has the extra cellular CTLA-4 binding region as described in Example 14. This binding region is attached to a connecting region from human IgA as desribed in Example 5. This connecting region is attached to a human IgA constant region consisting of a wild type CH2 region and a mutated CH3 region where there is a truncation of 4 amino acid residues prior to the 3′ stop codon as described in Example 13. This construct has previously been refered to as CTLA-4 IgAH IgA-T4, which has the same sequence as the above construct. The polynucleotide sequence is provided in SEQ ID NO:______, and the encoded polypeptide sequence is provided in SEQ ID NO:______.

### Example 150

### 2H7 scFv IgAH IgACH2CH3

[0833] This construct has a 2H7 (anti-CD20) single chain Fv binding region as described in Example 1. This binding region is attached to a wild type human IgA connecting region as described in Example 5. This connecting region is attached to a wild type human IgA CH2 and CH3 constant region according to methods described in Example 13. The polynucleotide sequence is provided in SEQ ID NO:______, and the encoded polypeptide sequence is provided in SEQ ID NO:______.

### Example 151

### 2H7 scFv IgAH IgAHCH2 T18CH3

[0834] This construct has a 2H7 (anti-CD20) single chain Fv binding region as described in Example 1. This binding region is attached to a connecting region from human IgA as desribed in Example 5. This connecting region is attached to a human IgA constant region consisting of a wild type CH2 region and a mutated CH3 region where there is a truncation of 18 amino acid residues prior to the 3′ stop codon as described in Example 13. The polynucleotide sequence is provided in SEQ ID NO:______, and the encoded polypeptide sequence is provided in SEQ ID NO:______.

### Example 152

### 2H7-40.2.220 scFv (SSS-S)H WCH2 WCH3

[0835] A bispecific fusion protein was constructed between 2H7 scFv (anti-CD20) and 40.2.220 (anti-CD40), which both target B cell receptors. The 2H7 scFv hIgG1 (SSS-S)H WCH2 WCH3 construct in the expression vector pD18 was passaged through dam⁻ bacteria in order to permit cleavage at the BclI site. Cleaved plasmid was treated with alkaline phosphatase prior to ligation to a BclI cut linker-CD40 scFv fragment. This fragment was synthesized from the existing 40.2.220 scFv by successive PCR reactions with overlapping primers. The linker attached is a previously patented (BMS patent issued) helical type linker with a high number of lysine and glutamic acid residues. The scFv for CD40 was PCR amplified without the leader peptide as a SalI-BclI fragment, but with the hinge type linker substituted at the amino terminus as a BclI-SalI fragment, to mediate insertion of the linker-scFv cassette as a BclI fragment between the scFv and −Ig tail included in an existing scFvIg construct for CD20 (2H7 scFv hIgG1 constructs). The 3′ end was similar to the other scFv V_{H} molecules with an out of frame BclI site fused to the VTVSS type sequence at the end of the V_{H} domain. PCR oligos:

[0836] 40.2.220 scFv:

(SEQ ID NO )

5′ primer--40.2.220S5:
5′-gttgttgtcgacattgttctgactcagtctccagccaccctgtc-3′

(SEQ ID NO )

3′ primer--40.2.220Bcl3:
5′-gttgttgatcagagacagtgaccagtgtcccttgg-3′

Linker Primers:

[0837] BclI-SalI fragment created by annealing complementary oligonucleotides. This fragment is then ligated into BclI digested vector along with a SalI-BclI scFv to create the (linker-scFv) BclI fragment desired for shuttling.

| | | |
|---|---|---|
| 5′ primer: | 5′-gatcaatccaactctgaagaagcaaagaaagaggaggccaaaaaggaggaagccaagaaatctaacagcg- | (SEQ ID NO ) |
| | 3′ | |
| 3′ primer: | 5′-tcgacgctgttagatttcttggcttcctcctttttggcctcctctttctttgcttcttcagagttggatt-3′ | (SEQ ID NO ) |

[0838] This BclI fragment was then ligated downstream of the 2H7 scFv in pD 18-Ig. Transformants were screened for the presence of a 2.4 kb HindIII-Xba insert and positive clones sequenced prior to further studies. COS cell transient transfections were performed with this construct and culture supernatants screened for the presence of protein of the predicted size and for binding to CD20 and to CD40 transfected CHO cells.

[0839] New bispecific constructs can be created by designing hinge type linkers which incorporate one or preferably two restriction sites at either end of the linker, facilitating asymmetric digests and transfer of (linker-scFv) or (scFv-linker) cassettes between different constructs. These constructs will also incorporate the V_{H} L11S and other V region substitutions, which presumably facilitate proper folding and result in increased expression of the molecules in which they are inserted.

[0840] This binding region is connected to a mutated human IgG1 connecting region where all of the cysteines and one proline have been changed to serines (SSS-S) according to methods described in Example 5. This connecting region is attached to wild type human IgG1 CH2 and CH3 constant regions as described in Example 1. This construct has previously been referred to as anti-CD20-anti-CD40 scFv IgG MTH (SSS) MTCH2WTCH3, which has the same sequence as the above construct. The polynucleotide sequence is provided in SEQ ID NO:______, and the encoded polypeptide sequence is provided in SEQ ID NO:______.

### Example 153

### 2H7 scFv IgAH IgACH2 T4CH3—hCD80 TM/CT

[0841] This construct has a 2H7 (anti-CD20) single chain Fv binding region as described in Example 1. This binding region is attached to a connecting region from human IgA as desribed in Example 5. This connecting region is attached to a human IgA constant region consisting of a wild type CH2 region and a mutated CH3 region where there is a truncation of 4 amino acid residues prior to the 3′ stop codon as described in Example 13. This CH3 region is attached to a hCD80 TM/CT according to the methods described in Examples 113 and 119. This construct has previously been referred to as 2H7 scFv IgA hinge IgA-T4-CD80 and 2H7 scFv IgAH IgA-T4-CD80, which both have the same sequence as the above construct. The polynucleotide sequence is provided in SEQ ID NO:______, and the encoded polypeptide sequence is provided in SEQ ID NO:______.

### Example 154

[0842] G19-4 scFv (CCC-P) WH WCH2 WCH3—hCD80 TM/CT

[0843] This construct has a G19 (anti-CD3) single chain Fv binding region described in Example 29. This binding region is attached to a wild type human IgG1 connecting region (CCC-P) as described in Example 1. This connecting region is attached to wild type human IgG1 CH2 and CH3 constant regions as described in Example 1. This CH3 region is attached to a hCD80 TM/CT according to the methods described in Examples 113. The polynucleotide sequence is provided in SEQ ID NO:______, and the encoded polypeptide sequence is provided in SEQ ID NO:______.

### Example 155

### 2e12 scFv (CCC-P) WH WCH2 WCH3—HCD80 TM/CT

[0844] This construct has a 2e12 (anti-CD28) single chain Fv binding region described in Example 12. This binding region is attached to a wild type human IgG1 connecting region (CCC-P) as described in Example 1. This connecting region is attached to wild type human IgG1 CH2 and CH3 constant regions as described in Example 1. This CH3 region is attached to a hCD80 TM/CT according to the methods described in Examples 113. The polynucleotide sequence is provided in SEQ ID NO:______, and the encoded polypeptide sequence is provided in SEQ ID NO:______.

### Example 156

### 2H7 VHL11S scFv (SSS-S) IgECH3CH4

[0845] This construct has a 2H7 (anti-CD20) single chain Fv binding region with a point mutation at amino acid residue 11 in the heavy chain variable region, where the leucine has been changed to a serine as described in Example 33. This binding region is connected to a mutated human IgG1 connecting region where all of the cysteines and one proline have been changed to serines (SSS-S) according to methods described in Example 5. This connecting region is attached to human IgE CH3 and CH4 constant region. This truncated constant region was created according to the methods described in Example 38. The polynucleotide sequence is provided in SEQ ID NO:______, and the encoded polypeptide sequence is provided in SEQ ID NO:

### Example 157

### IgD HINGE

[0846] An alternative hinge region can be isolated from human IgD immunoglobulin hinge region by using PCR assay to isolate the desired region. The PCR reaction is the same used in Example 1. This hinge was truncated by 6 amino acid residues at the 3′ end. The primers used in this PCR reaction are listed below.

| 5″ Primer: | |
|---|---|
| 5′- | (SEQ ID NO ) |
| GTGGATCCAGGTTCGAAGTCTCCAAAGGCACAGGCC- | |
| 3′ | |
| 3′ primer: | |
| 5′- | (SEQ ID NO ) |
| GTTGTCGACTGCACCGGTCTTTGTCTCTCTCTCTTC- | |
| 3′ | |

[0847] The polynucleotide sequence is provided in SEQ ID NO:______, and the encoded polypeptide sequence is provided in SEQ ID NO:______.

### Example 158

### hCD28 TM/CT

[0848] For some of the cell surface ORF constructs, the transmembrane domain of CD80 was substituted with the transmembrane domain of human CD28 because it forms a dimer on the cell surface rather than a monomer as the CD80 does. Several of the molecules which drive the apoptotic program require oligomerization/trimerization to form a signaling complex; therefore, it is important to be able to control initiation of signaling by controlling the degree of oligomerization of these recombinant receptors on the cell surface. The primers used in PCR amplification of the CD28 tail are given below:

(SEQ ID NO )

5′ Primer:
5′-
gttgtggatccttcgaaccccttttgggtgctggtggtggttggtgga-
3′

(SEQ ID NO )

3′ primer:
5′-gttgttatcgatctcgagtcaggagcgataggctgcgaagtc-3′

[0849] The polynucleotide sequence is provided in SEQ ID NO:______, and the encoded polypeptide sequence is provided in SEQ ID NO:______.

### Example 159

### 2H7 scFv VH L11S (SSS-S)H K322L CH2 WCH3

[0850] This construct has a 2H7 (anti-CD20) single chain Fv binding region with a point mutation at amino acid residue 11 in the heavy chain variable region, where the leucine has been changed to a serine as described in Example 33. This binding region is connected to a mutated human IgG connecting region where all of the cysteines and one proline have been changed to serines (SSS-S) according to methods described in Example 5. The connecting region is attached to a mutated IgG CH2 region and a wild type IgG CH3 region. The K322L mutation in the CH2 region is at a residue 322, where a Lysine has been changed to a leucine using overlapping PCR described in Example 56, but with different primers for the first PCR reaction, which are listed below.

| | |
|---|---|
| 5′ primer: | |
| 5′ttcctcttccccccaaaacccaaggacaccctcatgatctcccggaaccctgaggtcac-3′ | (SEQ ID NO ) |
| 3′ primer: | |
| 5′-ggacagtgggagtggcacc-3′ | (SEQ ID NO ) |

[0851] PCR product was cloned into TOPO vector and sequenced. The polynucleotide sequence is provided in SEQ ID NO:______, and the encoded polypeptide sequence is provided in SEQ ID NO:______.

### Example 160

### 2H7 scFv VH L11S (CSS-S)H K322L CH2 WCH3

[0852] This construct has a 2H7 (anti-CD20) single chain Fv binding region with a point mutation at amino acid residue 11 in the heavy chain variable region, where the leucine has been changed to a serine, as described in Example 33. This binding region is attached to a mutant IgG connecting region, where the second and third cysteines have been changed to serines and the proline has been changed to serine (CSS-S), according to methods described in Example 23. The connecting region is attached to a mutated IgG CH2 region and a wild type IgG CH3 region. The K322L mutation in the CH2 region is at a residue 322, where a Lysine has been changed to a leucine using overlapping PCR described in Example 56, using primers from Example 159 in the first PCR reaction and primers from Example 57 for the second PCR reaction.

[0853] PCR products were cloned into the TOPO vector and sequenced. The polynucleotide sequence is provided in SEQ ID NO:______, and the encoded polypeptide sequence is provided in SEQ ID NO:______.

[0854] Additional representative constructs or sequences within various of examples of the present invention are as follows:

NT
HuIgG1 wild type hinge, CH2, CH3(nucleotidesequence)
tctgatcaggagcccaaatcttgtgacaaaactcacacatgcccaccgtgcccagcacctgaactcctggggggaccgtcagtcttc
ctcttccccccaaaacccaaggacaccctcatgatctcccggacccctgaggtcacatgcgtggtggtggacgtgagccacgaaga
ccctgaggtcaagttcaactggtacgtggacggcgtggaggtgcataatgccaagacaaagccgcgggaggagcagtacaacag
cacgtaccgtgtggtcagcgtcctcaccgtcctgcaccaggactggctgaatggcaaggagtacaagtgcaaggtctccaacaaag
ccctcccagcccccatcgagaaaacaatctccaaagccaaagggcagccccgagaaccacaggtgtacaccctgcccccatccc
gggatgagctgaccaagaaccaggtcagcctgacctgcctggtcaaaggcttctatcccagcgacatcgccgtggagtgggagag
caatgggcagccggagaacaactacaagaccacgcctcccgtgctggactccgacggctccttcttcctctacagcaagctcaccgt
ggacaagagcaggtggcagcaggggaacgtcttctcatgctccgtgatgcatgaggctctgcacaaccactacacgcagaagagc
ctctccctgtctccgggtaaatgatctaga
AA
HuIgG1 wild type hinge, CH2, CH3(amino acid sequence)
SDQEPKSCDKTHTCPPCPAPELLGGPSVFLFPPKPKDTLMISRTPEVTCVVVDVSHED
PEVKFNWYVDGVEVHNAKTKPREEQYNSTYRVVSVLTVLHQDWLNGKEYKCKVS
NKALPAPIEKTISKAKGQPREPQVYTLPPSRDELTKNQVSLTCLVKGFYPSDIAVEW
ESNGQPENNYKTTPPVLDSDGSFFLYSKLTVDKSRWQQGNVFSCSVMHEALHNHY
TQKSLSLSPGK
NT
Llama IgG1 hinge, CH2, CH3(nucleotide sequence)
tgatcaagaaccacatggaggatgcacgtgcccncagtgcccncaatgcccngcnccngaactnccaggaggcccttctgtctttg
tcttccccccgaaacccaaggacgtcctctccatttttggaggccgagtcacgtgcgttgtagtggacgtcggaaagaaagaccccg
aggtcaatttcaactggtatattgatggcgttgaggtgcgaacggccaatacgaagccaaaagaggaacagttcaacagcacgtacc
gcgtggtcagcgtcctgcccatccagcaccaggactggctgacggggaaggaattcaagtgcaaggtcaacaacaaagctctccc
ggcccccatcgagaggaccatctccaaggccaaagggcagacccgggagccgcaggtgtacaccctggccccacaccgggaa
gaactggccaaggacaccgtgagcgtaacatgcctggtcaaaggcttctacccagctgacatcaacgttgagtggcagaggaacg
gtcagccggagtcagagggcacctacgccaacacgccgccacagctggacaacgacgggacctacttcctctacagcaagctctc
ggtgggaaagaacacgtggcagcggggagaaaccttaacctgtgtggtgatgcatgaggccctgcacaaccactacacccagaaa
tccatcacccagtcttcgggtaaatagtaatctaga
AA
Llama IgG1 hinge, CH2, CH3 (in FIG. 23 as Llama IgG1(amino acid sequence)
EPHGGCTCPQCPAPELPGGPSVFVFPPKPKDVLSISGRPEVTCVVVDVGKEDPEVNF
NWYIDGVEVRTANTKPKEEQFNSTYRVVSVLPIQHQDWLTGKEFKCKVNNKALPA
PIERTISKAKGQTREPQVYTLAPHREELAKDTVSVTCLVKGFYPADINVEWQRNGQP
ESEGTYANTPPQLDNDGTYFLYSRLSVGKNTWQRGETLTGVVMHEALHNHYTQKS
ITQSSGK
NT
Llama IgG2(nucleotide sequence)
tgatcaagaacccaagacaccaaaaccacaaccacaaccacaaccacaacccaatcctacaacagaatccaagtgtcccaaatgtc
cagcccctgagctcctgggagggccctcagtcttcatcttccccccgaaacccaaggacgtcctctccatttctgggaggcccgagg
tcacgtgcgttgtggtagacgtgggccaggaagaccccgaggtcagtttcaactggtacattgatggcgctgaggtgcgaacggcc
aacacgaggccaaaagaggaacagttcaacagcacgtaccgcgtggtcagcgtcctgcccatccagcaccaggactggctgacg
gggaaggaattcaagtgcaaggtcaacaacaaagctctcccggcccccatcgagaagaccatctccaaggccaaagggcagacc
cgggagccgcaggtgtacaccctggccccacaccgggaagagctggccaaggacaccgtgagcgtaacatgcctggtcaaagg
cttctacccacctgatatcaacgttgagtggcagaggaatgggcagccggagtcagagggcacytacgccaccacgccaccccag
ctggacaacgacgggacctacttcctctacagcaagctctcggtgggaaagaacacgtggcagcagggagaaaccttcacctgtgt
ggtgatgcacgaggccctgcacaaccactacacccagaaatccatcacccagtcttcgggtaaatagtaatctaga
AA
Llama IgG2(amino acid sequence)
DQEPKTPKPQPQPQPQPNPTTESKCPKCPAPELLGGPSVFIFPPKPKDVLSISGRPEVT
CVVVDVGQEDPEVSFNWYIDGAEVRTANTRPKEEQFNSTYRVVSVLPIQHQDWLT
GKEFKCKVNNKALPAPIEKTISKAKGQTREPQVYTLAPHREELAKDTVSVTCLVKG
FYPPDINVEWQRNGQPESEGTYATTPPQLDNDGTYFLYSKLSVGKNTWQQGETFTC
VVMHEALHNHYTQKSITQSSGK
NT
Llama IgG3 Fc(nucleotide sequence)
tgatcaagcgcaccacagcgaagaccccagctccaagtgtcccaaatgcccaggccctgaactccttggagggcccacggtcttca
tcttccccccgaaagccaaggacgtcctctccatcacccgaaaacctgaggtcacgtgcttgtggtggacgtgggtaaagaagaccc
tgagatcgagttcaagctggtccgtggatgacacagaggtacacacggctgagacaaagccaaaggaggaacagttcaacagcac
gtaccgcgtggtcagcgtcctgcccatccagcaccaggactggctgacggggaaggaattcaagtgcaaggtcaacaacaaagct
ctcccagcccccatcgagaggaccatctccaaggccaaagggcagacccgggagccgcaggtgtacaccctggccccacaccg
ggaagagctggccaaggacaccgtgagcgtaacctgcctggtcaaaggcttcttcccagctgacatcaacgttgagtggcagagga
atgggcagccggagtcagagggcacctacgccaacacgccgccacagctggacaacgacgggacctacttcctctacagcaaac
tctccgtgggaaagaacacgtggcagcagggagaagtcttcacctgtgtggtgatgcacgaggctctacacaatcactccacccag
aaatccatcacccagtcttcgggtaaatagtaatctagagggccc
AA
Llama IgG3 Fc(amino acid sequence)
DQAHHSEDPSSKCPKCPGPELLGGPTVFIFPPKAKDVLSITRKPEVTCLWWTWVKKT
LRSSSSWSVDDTEVHTAETKPKEEQFNSTYRVVSVLPIQHQDWLTGKEFKCKVNNK
ALPAPIERTISKAKGQTREPQVYTLAPHREELAKDTVSVTCLVKGFFPADINVEWQR
NGQPESEGTYANTPPQLDNDGTYFLYSKLSVGKNTWQQGEVFTCVVMHEALHNHS
TQKSITQSSGK
NT
HuIgG1 wild type hinge(nucleotide sequence)
gatcaggagcccaaatcttgtgacaaaactcacacatgcccaccgtgcccagca
AA
HuIgG1 wild type hinge(amino acid sequence)
DQEPKSCDKTHTCPPCPA
NT
HuIgG1 H2, wild type hinge with leu at second position(nucleotide sequence)
gatctggagcccaaatcttgtgacaaaactcacacatgcccaccgtgcccagca
AA
HuIgG1 H2, wild type hinge with leu at second position(amino acid sequence)
DLEPKSCDKTHTCPPCPA
NT
HuIgG1 wild type CH2(nucleotide sequence)
cctgaactcctggggggaccgtcagtcttcctcttccccccaaaacccaaggacaccctcatgatctcccggacccctgaggtcacat
gcgtggtggtggacgtgagccacgaagaccctgaggtcaagttcaactggtacgtggacggcgtggaggtgcataatgccaagac
aaagccgcgggaggagcagtacaacagcacgtaccgtgtggtcagcgtcctcaccgtcctgcaccaggactggctgaatggcaa
ggagtacaagtgcaaggtctccaacaaagccctcccagcccccatcgagaaaaccatctccaaagccaaa
AA
HuIgG1 wild type CH2(amino acid sequence)
PELLGGPSVFLFPPKPKDTLMISRTPEVTCVVVDVSHEDPEVKFNWYVDGVEVHNA
KTKPREEQYNSTYRVVSVLTVLHQDWLNGKEYKCKVSNKALPAPIEKTISKAK
NT
HuIgG1 wild type CH3(nucleotide sequence)
gggcagccccgagaaccacaggtgtacaccctgcccccatcccgggaggagatgaccaagaaccaggtcagcctgacctgcctg
gtcaaaggcttctatcccagcgacatcgccgtggagtgggagagcaatgggcagccggagaacaactacaagaccacgcctccc
gtgctggactccgacggctccttcttcctctatagcaagctcaccgtggacaagagcaggtggcagcaggggaacgtcttctcatgct
ccgtgatgcatgaggctctgcacaaccactacacgcagaagagcctctccctgtccccgggtaaatga
AA
HuIgG1 wild type CH3(amino acid sequence)
GQPREPQVYTLPPSREEMTKNQVSLTCLVKGFYPSDIAVEWESNGQPENNYKTTPP
VLDSDGSFFLYSKLTVDKSRWQQGNVFSCSVMHEALHNHYTQKSLSLSPGK
NT
HuIgG1 mutated hinge (C-C-C→S-S-S)(nucleotide sequence)
gatcaggagcccaaatcttctgacaaaactcacacatccccaccgtccccagca
AA
HuIgG1 mutated hinge (C-C-C→S-S-S)(amino acid sequence)
DQEPKSSDKTHTSPPSPA
NT
HIgG1MTH WTCH2CH3(mutant hinge with wild type CH2 and CH3
(reads from the hinge+Ig tail) (nucleotide sequence)
tgatcaccccaaatcttctgacaaaactcacacatctccaccgtcctcagcacctgaactcctgggtggaccgtcagtcttcctcttccc
cccaaaacccaaggacaccctcatgatctcccggacccctgaggtcacatgcgtggtggtggacgtgagccacgaagaccctgag
gtcaagttcaactggtacgtggacggcgtggaggtgcataatgccaagacaaagccgcgggaggagcagtacaacagcacgtac
cgtgtggtcagcgtcctcaccgtcctgcaccaggactggctgaatggcaaggagtacaagtgcaaggtctccaacaaagccctccc
agcccccatcgagaaaacaatctccaaagccaaagggcagccccgagaaccacaggtgtacaccctgcccccatcccgggatga
gctgaccaagaaccaggtcagcctgacctgcctggtcaaaggcttctatcccagcgacatcgccgtggagtgggagagcaatggg
cagccggagaacaactacaagaccacgcctcccgtgctggactccgacggctccttcttcctctacagcaagctcaccgtggacaa
gagcaggtggcagcaggggaacgtcttctcatgctccgtgatgcatgaggctctgcacaaccactacacgcagaagagcctctccc
tgtctccgggtaaatgataatctaga
AA
Mutant hinge, but wild type CH2 and CH3 (amino acid sequence)
DHPKSSDKTHTSPPSSAPELLGGPSVFLFPPKPKDTLMISRTPEVTCVVVDVSHEDPE
VKFNWYVDGVEVHNAKTKPREEQYNSTYRVVSVLTVLHQDWLNGKEYKCKVSN
KALPAPIEKTISKAKGQPREPQVYTLPPSRDELTKNQVSLTCLVKGFYPSDIAVEWES
NGQPENNYKTTPPVLDSDGSFFLYSKLTVDKSRWQQGNVFSCSVMHEALHNHYTQ
KSLSLSPGK
NT

| | | |
|---|---|---|
| LLG1-5′bgl | 35 mer | Llama IgG1 5′ |

5′-gtt gtt gat caa gaa cca cat gga gga tgc acg tg-3′
NT

| | |
|---|---|
| LLG2-5′bgl | 32 mer, Llama IgG2-5′ |

5′-gtt gtt gat caa gaa ccc aag aca cca aaa cc-3′
NT

| | |
|---|---|
| LLG3-5′bgl | 33 mer, Llama IgG3-5′ |

5′-gtt gtt gat caa gcg cac cac agc gaa gac ccc-3′
NT

| | |
|---|---|
| LLseqsense | 19mer, llama sequencing primer |

5′-ctg aga tcg agt tca gct g-3′
NT

| | |
|---|---|
| LLseqAS | 19 mer |

5′-cct cct ttg gct ttg tct c-3′
NT
2H7 scFv llama IgG1(nucleotide sequence)
aagcttgccgccatggattttcaagtgcagattttcagcttcctgctaatcagtgcttcagtcataattgccagaggacaaattgttctctc
ccagtctccagcaatcctgtctgcatctccaggggagaaggtcacaatgacttgcagggccagctcaagtgtaagttacatgcactgg
taccagcagaagccaggatcctcccccaaaccctggatttatgccccatccaacctggcttctggagtccctgctcgcttcagtggca
gtgggtctgggacctcttactctctcacaatcagcagagtggaggctgaagatgctgccacttattactgccagcagtggagttttaac
ccacccacgttcggtgctgggaccaagctggagctgaaagatggcggtggctcgggcggtggtggatctggaggaggtgggagc
tctcaggcttatctacagcagtctggggctgagctggtgaggcctggggcctcagtgaagatgtcctgcaaggcttctggctacacat
ttaccagttacaatatgcactgggtaaagcagacacctagacagggcctggaatggattggagctatttatccaggaaatggtgatact
tcctacaatcagaagttcaagggcaaggccacactgactgtagacaaatcctccagcacagcctacatgcagctcagcagcctgac
atctgaagactctgcggtctatttctgtgcaagagtggtgtactatagtaactcttactggtacttcgatgtctggggcacagggaccac
ggtcaccgtctcttctgatcaagaaccacatggaggatgcacgtgcccncagtgcccncaatgcccngcnccngaactnccagga
ggcccttctgtctttgtcttccccccgaaacccaaggacgtcctctccatttttggaggccgagtcacgtgcgttgtagtggacgtcgga
aagaaagaccccgaggtcaatttcaactggtatattgatggcgttgaggtgcgaacggccaatacgaagccaaaagaggaacagtt
caacagcacgtaccgcgtggtcagcgtcctgcccatccagcaccaggactggctgacggggaaggaattcaagtgcaaggtcaac
aacaaagctctcccggcccccatcgagaggaccatctccaaggccaaagggcagacccgggagccgcaggtgtacaccctggc
cccacaccgggaagaactggccaaggacaccgtgagcgtaacatgcctggtcaaaggcttctacccagctgacatcaacgttgagt
ggcagaggaacggtcagccggagtcagagggcacctacgccaacacgccgccacagctggacaacgacgggacctacttcctct
acagcaagctctcggtgggaaagaacacgtggcagcggggagaaaccttaacctgtgtggtgatgcatgaggccctgcacaacca
ctacacccagaaatccatcacccagtcttcgggtaaatagtaatctaga
AA
2H7 scFv llama IgG1(amino acid sequence)
MDFQVQIFSFLLISASVIIARGQIVLSQSPAILSASPGEKVTMTCRASSSVSYMHWYQ
QKPGSSPKPWIYAPSNLASGVPARFSGSGSGTSYSLTISRVEAEDAATYYCQQWSFN
PPTFGAGTKLELKDGGGSGGGGSGGGGSSQAYLQQSGAELVRPGASVKMSCKASG
YTFTSYNMHWVKQTPRQGLEWIGAIYPGNGDTSYNQKFKGKATLTVDKSSSTAYM
QLSSLTSEDSAVYFCARVVYYSNSYWYFDVWGTGTTVTVSSDQEPHGGCTCPQCP
APELPGGPSVFVFPPKPKDVLSIFGGRVTCVVVDVGKKDPEVNFNWYIDGVEVRTA
NTKPKEEQFNSTYRVVSVLPIQHQDWLTGKEFKCKVNNKALPAPIERTISKAKGQTR
EPQVYTLAPHREELAKDTVSVTCLVKGFYPADINVEWQRNGQPESEGTYANTPPQL
DNDGTYFLYSKLSVGKNTWQRGETLTCVVMHEALHNHYTQKSITQSSGK
NT
2H7 scFv llama IgG2(nucleotide sequence)
aagcttgccgccatggattttcaagtgcagattttcagcttcctgctaatcagtgcttcagtcataattgccagaggacaaattgttctctc
ccagtctccagcaatcctgtctgcatctccaggggagaaggtcacaatgacttgcagggccagctcaagtgtaagttacatgcactgg
taccagcagaagccaggatcctcccccaaaccctggatttatgccccatccaacctggcttctggagtccctgctcgcttcagtggca
gtgggtctgggacctcttactctctcacaatcagcagagtggaggctgaagatgctgccacttattactgccagcagtggagttttaac
ccacccacgttcggtgctgggaccaagctggagctgaaagatggcggtggctcgggcggtggtggatctggaggaggtgggagc
tctcaggcttatctacagcagtctggggctgagctggtgaggcctggggcctcagtgaagatgtcctgcaaggcttctggctacacat
ttaccagttacaatatgcactgggtaaagcagacacctagacagggcctggaatggattggagctatttatccaggaaatggtgatact
tcctacaatcagaagttcaagggcaaggccacactgactgtagacaaatcctccagcacagcctacatgcagctcagcagcctgac
atctgaagactctgcggtctatttctgtgcaagagtggtgtactatagtaactcttactggtacttcgatgtctggggcacagggaccac
ggtcaccgtctcttctgatcaagaacccaagacaccaaaaccacaaccacaaccacaaccacaacccaatcctacaacagaatcca
agtgtcccaaatgtccagcccctgagctcctgggagggccctcagtcttcatcttccccccgaaacccaaggacgtcctctccatttct
gggaggcccgaggtcacgtgcgttgtggtagacgtgggccaggaagaccccgaggtcagtttcaactggtacattgatggcgctg
aggtgcgaacggccaacacgaggccaaaagaggaacagttcaacagcacgtaccgcgtggtcagcgtcctgcccatccagcacc
aggactggctgacggggaaggaattcaagtgcaaggtcaacaacaaagctctcccggcccccatcgagaagaccatctccaaggc
caaagggcagacccgggagccgcaggtgtacaccctggccccacaccgggaagagctggccaaggacaccgtgagcgtaacat
gcctggtcaaaggcttctacccacctgatatcaacgttgagtggcagaggaatgggcagccggagtcagagggcacytacgccac
cacgccaccccagctggacaacgacgggacctacttcctctacagcaagctctcggtgggaaagaacacgtggcagcagggaga
aaccttcacctgtgtggtgatgcacgaggccctgcacaaccactacacccagaaatccatcacccagtcttcgggtaaatagtaatct
aga
AA
2H7 scFv llama IgG2(amino acid sequence)
MDFQVQIFSFLLISASVIIARGQIVLSQSPAILSASPGEKVTMTCRASSSVSYMHWYQ
QKPGSSPKPWIYAPSNLASGVPARFSGSGSGTSYSLTISRVEAEDAATYYCQQWSFN
PPTFGAGTKLELKDGGGSGGGGSGGGGSSQAYLQQSGAELVRPGASVKMSCKASG
YTFTSYNMHWVKQTPRQGLEWIGAIYPGNGDTSYNQKFKGKATLTVDKSSSTAYM
QLSSLTSEDSAVYFCARVVYYSNSYWYFDVWGTGTTVTVSSDQEPKTPKPQPQPQP
QPNPTTESKCPKCPAPELLGGPSVFIFPPKPKDVLSISGRPEVTCVVVDVGQEDPEVS
FNWYIDGAEVRTANTRPKEEQFNSTYRVVSVLPIQHQDWLTGKEFKCKVNNKALP
APIEKTISKAKGQTREPQVYTLAPHREELAKDTVSVTCLVKGFYPPDINVEWQRNG
QPESEGTYATTPPQLDNDGTYFLYSKLSVGKNTWQQGETFTCVVMHEALHNHYTQ
KSITQSSGK
NT
2H7 scFv llama IgG3(nucleotide sequence)
aagcttgccgccatggattttcaagtgcagattttcagcttcctgctaatcagtgcttcagtcataattgccagaggacaaattgttctctc
ccagtctccagcaatcctgtctgcatctccaggggagaaggtcacaatgacttgcagggccagctcaagtgtaagttacatgcactgg
taccagcagaagccaggatcctcccccaaaccctggatttatgccccatccaacctggcttctggagtccctgctcgcttcagtggca
gtgggtctgggacctcttactctctcacaatcagcagagtggaggctgaagatgctgccacttattactgccagcagtggagttttaac
ccacccacgttcggtgctgggaccaagctggagctgaaagatggcggtggctcgggcggtggtggatctggaggaggtgggagc
tctcaggcttatctacagcagtctggggctgagctggtgaggcctggggcctcagtgaagatgtcctgcaaggcttctggctacacat
ttaccagttacaatatgcactgggtaaagcagacacctagacagggcctggaatggattggagctatttatccaggaaatggtgatact
tcctacaatcagaagttcaagggcaaggccacactgactgtagacaaatcctccagcacagcctacatgcagctcagcagcctgac
atctgaagactctgcggtctatttctgtgcaagagtggtgtactatagtaactcttactggtacttcgatgtctggggcacagggaccac
ggtcaccgtctcttctgatcaagcgaaccacagcgaagaccccagctccaagtgtcccaaatgcccaggccctgaactccttggag
ggcccacggtcttcatcttccccccgaaagccaaggacgtcctctccatcacccgaaaacctgaggtcacgtgcttgtggtggacgt
gggtaaagaagaccctgagatcgagttcaagctggtccgtggatgacacagaggtacacacggctgagacaaagccaaaggagg
aacagttcaacagcacgtaccgcgtggtcagcgtcctgcccatccagcaccaggactggctgacggggaaggaattcaagtgcaa
ggtcaacaacaaagctctcccagcccccatcgagaggaccatctccaaggccaaagggcagacccgggagccgcaggtgtacac
cctggccccacaccgggaagagctggccaaggacaccgtgagcgtaacctgcctggtcaaaggcttcttcccagctgacatcaac
gttgagtggcagaggaatgggcagccggagtcagagggcacctacgccaacacgccgccacagctggacaacgacgggaccta
cttcctctacagcaaactctccgtgggaaagaacacgtggcagcagggagaagtcttcacctgtgtggtgatgcacgaggctctaca
caatcactccacccagaaatccatcacccagtcttcgggtaaatagtaatctagagggccc
AA
2H7 scFv llama IgG3 (amino acid sequence)
MDFQVQIFSFLLISASVIIARGQIVLSQSPAILSASPGEKVTMTCRASSSVSYMHWYQ
QKPGSSPKPWIYAPSNLASGVPARFSGSGSGTSYSLTISRVEAEDAATYYCQQWSFN
PPTFGAGTKLELKDGGGSGGGGSGGGGSSQAYLQQSGAELVRPGASVKMSCKASG
YTFTSYNMHWVKQTPRQGLEWIGAIYPGNGDTSYNQKFKGKATLTVDKSSSTAYM
QLSSLTSEDSAVYFCARVVYYSNSYWYFDVWGTGTTVTVSSDQAHSHSEDPSSKCP
KCPGPELLGGPTVFIFPPKAKDVLSITRKPEVTCLWWTWVKKTLRSSSSWSVDDTEV
HTAETKPKEEQFNSTYRVVSVLPIQHQDWLTGKEFKCKVNNKALPAPIERTISKAKG
QTREPQVYTLAPHREELAKDTVSVTCLVKGFFPADINVEWQRNGQPESEGTYANTP
PQLDNDGTYFLYSKLSVGKNTWQQGEVFTCVVMHEALHNHSTQKSITQSSGK
NT
2H7+Completely WT IgG tail(nucleotide sequence)
2H7 scFv WTH WTCH2CH3(nucleotide sequence)
aagcttgccgccatggattttcaagtgcagattttcagcttcctgctaatcagtgcttcagtcataattgccagaggacaaattgttctctc
ccagtctccagcaatcctgtctgcatctccaggggagaaggtcacaatgacttgcagggccagctcaagtgtaagttacatgcactgg
taccagcagaagccaggatcctcccccaaaccctggatttatgccccatccaacctggcttctggagtccctgctcgcttcagtggca
gtgggtctgggacctcttactctctcacaatcagcagagtggaggctgaagatgctgccacttattactgccagcagtggagttttaac
ccacccacgttcggtgctgggaccaagctggagctgaaagatggcggtggctcgggcggtggtggatctggaggaggtgggagc
tctcaggcttatctacagcagtctggggctgagctggtgaggcctggggcctcagtgaagatgtcctgcaaggcttctggctacacat
ttaccagttacaatatgcactgggtaaagcagacacctagacagggcctggaatggattggagctatttatccaggaaatggtgatact
tcctacaatcagaagttcaagggcaaggccacactgactgtagacaaatcctccagcacagcctacatgcagctcagcagcctgac
atctgaagactctgcggtctatttctgtgcaagagtggtgtactatagtaactcttactggtacttcgatgtctggggcacagggaccac
ggtcaccgtctcttctgatcaggagcccaaatcttgtgacaaaactcacacatgcccaccgtgcccagcacctgaactcctgggggg
accgtcagtcttcctcttccccccaaaacccaaggacaccctcatgatctcccggacccctgaggtcacatgcgtggtggtggacgtg
agccacgaagaccctgaggtcaagttcaactggtacgtggacggcgtggaggtgcataatgccaagacaaagccgcgggaggag
cagtacaacagcacgtaccgtgtggtcagcgtcctcaccgtcctgcaccaggactggctgaatggcaaggagtacaagtgcaaggt
ctccaacaaagccctcccagcccccatcgagaaaacaatctccaaagccaaagggcagccccgagaaccacaggtgtacaccct
gcccccatcccgggatgagctgaccaagaaccaggtcagcctgacctgcctggtcaaaggcttctatcccagcgacatcgccgtgg
agtgggagagcaatgggcagccggagaacaactacaagaccacgcctcccgtgctggactccgacggctccttcttcctctacagc
aagctcaccgtggacaagagcaggtggcagcaggggaacgtcttctcatgctccgtgatgcatgaggctctgcacaaccactacac
gcagaagagcctctccctgtctccgggtaaatgatctaga
AA
2H7 scFv WTH WTCH2CH3(amino acid sequence)
MDFQVQIFSFLLISASVIIARGQIVLSQSPAILSASPGEKVTMTCRASSSVSYMHWYQ
QKPGSSPKPWIYAPSNLASGVPARFSGSGSGTSYSLTISRVEAEDAATYYCQQWSFN
PPTFGAGTKLELKDGGGSGGGGSGGGGSSQAYLQQSGAELVRPGASVKMSCKASG
YTFTSYNMHWVKQTPRQGLEWIGAIYPGNGDTSYNQKFKGKATLTVDKSSSTAYM
QLSSLTSEDSAVYFCARVVYYSNSYWYFDVWGTGTTVTVSSDQEPKSCDKTHTCPP
CPAPELLGGPSVFLFPPKPKDTLMISRTPEVTCVVVDVSHEDPEVKFNWYVDGVEV
HNAKTKPREEQYNSTYRVVSVLTVLHQDWLNGKEYKCKVSNKALPAPIEKTISKA
KGQPREPQVYTLPPSRDELTKNQVSLTCLVKGFYPSDIAVEWESNGQPENNYKTTPP
VLDSDGSFFLYSKLTVDKSRWQQGNVFSCSVMHEALHNHYTQKSLSLSPGK
NT
CD80 transmembrane domain and cytoplasmic tail (+restriction sites)(nucleotide
sequence)
gcggatccttcgaacctgctcccatcctgggccattaccttaatctcagtaaatggaatttttgtgatatgctgcctgacctactgctttgc
cccaagatgcagagagagaaggaggaatgagagattgagaagggaaagtgtacgccctgtataaatcgat
AA
CD80 transmembrane domain and cytoplasmic tail(amino acid sequence)
ADPSNLLPSWAITLISVNGIFVICCLTYCFAPRCRERRRNERLRRESVRPV
NT
40.2.220 VL (anti-human CD40 scFv #1--VL)(nucleotide sequence)
aagcttatggattttcaagtgcagattttcagcttcctgctaatcagtgcttcagtcataatgtccagaggagtcgacattgttctgactca
gtctccagccaccctgtctgtgactccaggagatagagtctctctttcctgcagggccagccagagtattagcgactacttacactggt
atcaacaaaaatcacatgagtctccaaggcttctcatcaaatatgcttcccattccatctctgggatcccctccaggttcagtggcagtg
gatcagggtcagatttcactctcagtatcaacagtgtggaacctgaagatgttggaatttattactgtcaacatggtcacagctttccgtg
gacgttcggtggaggcaccaagctggaaatcaaacgg
AA
40.2.220 VL (anti-human CD40 scFv #1--VL)(amino acid sequence)
MDFQVQIFSFLLISASVIMSRGVDIVLTQSPATLSVTPGDRVSLSCRASQSISDYLHW
YQQKSHESPRLLIKYASHSISGIPSRFSGSGSGSDFTLSINSVEPEDVGIYYCQHGHSFP
WTFGGGTKLEIKR
NT
40.2.220 VH (for anti-human CD40 scFv #1--VH)(nucleotide sequence)
cagatccagttggtgcaatctggacctgagctgaagaagcctggagagacagtcaggatctcctgcaaggcttctgggtatgccttca
caactactggaatgcagtgggtgcaagagatgccaggaaagggtttgaagtggattggctggataaacaccccactctggagtgcc
aaaatatgtagaagacttcaaggacggtttgccttctctttggaaacctctgccaacactgcatatttacagataagcaacctcaaagat
gaggacacggctacgtatttctgtgtgagatccgggaatggtaactatgacctggcctactttgcttactggggccaagggacactgg
tcactgtctctgatca
AA
40.2.220 VH (for anti-human CD40 scFv #1--VH)(amino acid sequence)
QIQLVQSGPELKKPGETVRISCKASGYAFTTTGMQWVQEMPGKGLKWIGWINTPL
WSAKICRRLQGRFAFSLETSANTAYLQISNLKDEDTATYFCVRSGNGNYDLAYFAY
WGQGTLVTVS
NT
40.2.220 scFv (anti-human CD40 scFv #1)(nucleotide sequence)
aagcttatggattttcaagtgcagattttcagcttcctgctaatcagtgcttcagtcataatgtccagaggagtcgacattgttctgactca
gtctccagccaccctgtctgtgactccaggagatagagtctctctttcctgcagggccagccagagtattagcgactacttacactggt
atcaacaaaaatcacatgagtctccaaggcttctcatcaaatatgcttcccattccatctctgggatcccctccaggttcagtggcagtg
gatcagggtcagatttcactctcagtatcaacagtgtggaacctgaagatgttggaatttattactgtcaacatggtcacagctttccgtg
gacgttcggtggaggcaccaagctggaaatcaaacggggtggcggtggctcgggcggaggtgggtcgggtggcggcggatctc
agatccagttggtgcaatctggacctgagctgaagaagcctggagagacagtcaggatctcctgcaaggcttctgggtatgccttcac
aactactggaatgcagtgggtgcaagagatgccaggaaagggtttgaagtggattggctggataaacaccccactctggagtgcca
aaatatgtagaagacttcaaggacggtttgccttctctttggaaacctctgccaacactgcatatttacagataagcaacctcaaagatg
aggacacggctacgtatttctgtgtgagatccgggaatggtaactatgacctggcctactttgcttactggggccaagggacactggt
cactgtctctgatca
AA
40.2.220 scFv (anti-human CD40 scFv #1)(amino acid sequence)
MDFQVQIFSFLLISASVIMSRGVDIVLTQSPATLSVTPGDRVSLSCRASQSISDYLHW
YQQKSHESPRLLIKYASHSISGIPSRFSGSGSGSDFTLSINSVEPEDVGIYYCQHGHSFP
WTFGGGTKLEIKRGGGGSGGGGSGGGGSQIQLVQSGPELKKPGETVRISCKASGYA
FTTTGMQWVQEMPGKGLKWIGWINTPLWSAKICRRLQGRFAFSLETSANTAYLQIS
NLKDEDTATYFCVRSGNGNYDLAYFAYWGQGTLVTVS
NT
2e12 VL (with L6 VK leader peptide)(nucleotide sequence)
atggattttcaagtgcagattttcagcttcctgctaatcagtgcttcagtcataatgtccagaggagtcgacattgtgctcacccaatctcc
agcttctttggctgtgtctctaggtcagagagccaccatctcctgcagagccagtgaaagtgttgaatattatgtcacaagtttaatgcag
tggtaccaacagaaaccaggacagccacccaaactcctcatctctgctgcatccaacgtagaatctggggtccctgccaggtttagtg
gcagtgggtctgggacagacttcagcctcaacatccatcctgtggaggaggatgatattgcaatgtatttctgtcagcaaagtaggaa
ggttccttggacgttcggtggaggcaccaagctggaaatcaaacgg
AA
2e12 VL (with L6 VK leader peptide)(amino acid sequence)
MDFQVQIFSFLLISASVIMSRGVDIVLTQSPASLAVSLGQRATISCRASESVEYYVTSL
MQWYQQKPGQPPKLLISAASNVESGVPARFSGSGSGTDFSLNIHPVEEDDIAMYFCQ
QSRKVPWTFGGGTKLEIKR
NT
2e12 VH (no leader peptide)(nucleotide sequence)
caggtgcagctgaaggagtcaggacctggcctggtggcgccctcacagagcctgtccatcacatgcaccgtctcagggttctcatta
accggctatggtgtaaactgggttcgccagcctccaggaaagggtctggagtggctgggaatgatatggggtgatggaagcacag
actataattcagctctcaaatccagactgagcatcaccaaggacaactccaagagccaagttttcttaaaaatgaacagtctgcaaact
gatgacacagccagatactactgtgccagagatggttatagtaactttcattactatgttatggactactggggtcaaggaacctcagtc
accgtctcctca(gatctg)
AA
2e12 VH(amino acid sequence)
QVQLKESGPGLVAPSQSLSITCTVSGFSLTGYGVNWVRQPPGKGLEWLGMIWGDGS
TDYNSALKSRLSITKDNSKSQVFLKMNSLQTDDTARYYCARDGYSNFHYYVMDY
WGQGTSVTVSS
NT
2e12scFv(+Restriction sites)(nucleotide sequence)
aagcttatggattttcaagtgcagattttcagcttcctgctaatcagtgcttcagtcataatgtccagaggagtcgacattgtgctcaccca
atctccagcttctttggctgtgtctctaggtcagagagccaccatctcctgcagagccagtgaaagtgttgaatattatgtcacaagttta
atgcagtggtaccaacagaaaccaggacagccacccaaactcctcatctctgctgcatccaacgtagaatctggggtccctgccagg
tttagtggcagtgggtctgggacagacttcagcctcaacatccatcctgtggaggaggatgatattgcaatgtatttctgtcagcaaagt
aggaaggttccttggacgttcggtggaggcaccaagctggaaatcaaacggggtggcggtggctcgggcggaggtgggtcgggt
ggcggcggatctcaggtgcagctgaaggagtcaggacctggcctggtggcgccctcacagagcctgtccatcacatgcaccgtct
cagggttctcattaaccggctatggtgtaaactgggttcgccagcctccaggaaagggtctggagtggctgggaatgatatggggtg
atggaagcacagactataattcagctctcaaatccagactgagcatcaccaaggacaactccaagagccaagttttcttaaaaatgaa
cagtctgcaaactgatgacacagccagatactactgtgccagagatggttatagtaactttcattactatgttatggactactggggtcaa
ggaacctcagtcaccgtctcctct(gatcag)
AA
2e12scFv(amino acid sequence)
MDFQVQIFSFLLISASVIMSRGVDIVLTQSPASLAVSLGQRATISCRASESVEYYVTSL
MQWYQQKPGQPPKLLISAASNVESGVPARFSGSGSGTDFSLNIHPVEEDDIAMYFCQ
QSRKVPWTFGGGTKLEIKRGGGGSGGGGSGGGGSQVQLKESGPGLVAPSQSLSITC
TVSGFSLTGYGVNWVRQPPGKGLEWLGMIWGDGSTDYNSALKSRLSITKDNSKSQ
VFLKMNSLQTDDTARYYCARDGYSNFHYYVMDYWGQGTSVTVSS
NT
10A8 is anti-CD152 (CTLA-4)
10A8 VL (with L6 VK leader peptide)(nucleotide sequence)
atggattttcaagtgcagattttcagcttcctgctaatcagtgcttcagtcataatgtccagaggagtcgacatccagatgacacagtctc
catcctcactgtctgcatctctgggaggcaaagtcaccatcacttgcaaggcaagccaagacattaagaagtatataggttggtacca
acacaagcctggaaaaggtcccaggctgctcatatattacacatctacattacagccaggcatcccatcaaggttcagtggaagtggg
tctgggagagattattccctcagcatcagaaacctggagcctgaagatattgcaacttattattgtcaacagtatgataatcttccattgac
gttcggctcggggacaaagttggaaataaaacgg
AA
10A8 VL(amino acid sequence)
MDFQVQIFSFLLISASVIMSRGVDIQMTQSPSSLSASLGGKVTITCKASQDIKKYIGW
YQHKPGKGPRLLIYYTSTLQPGIPSRFSGSGSGRDYSLSIRNLEPEDIATYYCQQYDN
LPLTFGSGTKLEIKR
NT
10A8 VH (no leader peptide)(nucleotide sequence)
gatgtacagcttcaggagtcaggacctggcctcgtgaaaccttctcagtctctgtctctcacctgctctgtcactggctactccatcacc
agtggtttctactggaactggatccgacagtttccgggaaacaaactggaatggatgggccacataagccacgacggtaggaataac
tacaacccatctctcataaatcgaatctccatcactcgtgacacatctaagaaccagtttttcctgaagttgagttctgtgactactgagga
cacagctacatatttctgtgcaagacactacggtagtagcggagctatggactactggggtcaaggaacctcagtcaccgtctcctct
gatca
AA
10A8 VH(amino acid sequence)
DVQLQESGPGLVKPSQSLSLTCSVTGYSITSGFYWNWIRQFPGNKLEWMGHISHDG
RNNYNPSLINRISITRDTSKNQFFLKLSSVTTEDTATYFCARHYGSSGAMDYWGQGT
SVTVSS
NT
10A8 SCFV(nucleotide sequence)
aagcttatggattttcaagtgcagattttcagcttcctgctaatcagtgcttcagtcataatgtccagaggagtcgacatccagatgacac
agtctccatcctcactgtctgcatctctgggaggcaaagtcaccatcacttgcaaggcaagccaagacattaagaagtatataggttgg
taccaacacaagcctggaaaaggtcccaggctgctcatatattacacatctacattacagccaggcatcccatcaaggttcagtggaa
gtgggtctgggagagattattccctcagcatcagaaacctggagcctgaagatattgcaacttattattgtcaacagtatgataatcttcc
attgacgttcggctcggggacaaagttggaaataaaacggggtggcggtggctcgggcggtggtgggtcgggtggcggcggatct
gatgtacagcttcaggagtcaggacctggcctcgtgaaaccttctcagtctctgtctctcacctgctctgtcactggctactccatcacc
agtggtttctactggaactggatccgacagtttccgggaaacaaactggaatggatgggccacataagccacgacggtaggaataac
tacaacccatctctcataaatcgaatctccatcactcgtgacacatctaagaaccagtttttcctgaagttgagttctgtgactactgagga
cacagctacatatttctgtgcaagacactacggtagtagcggagctatggactactggggtcaaggaacctcagtcaccgtctcctct
gatca
AA
10A8 SCFV(amino acid sequence)
MDFQVQIFSFLLISASVIMSRGVDIQMTQSPSSLSASLGGKVTITCKASQDIKKYIGW
YQHKPGKGPRLLIYYTSTLQPGIPSRFSGSGSGRDYSLSIRNLEPEDIATYYCQQYDN
LPLTFGSGTKLEIKRGGGGSGGGGSGGGGSDVQLQESGPGLVKPSQSLSLTCSVTGY
SITSGFYWNWIRQFPGNKLEWMGHISHDGRNNYNPSLINRISITRDTSKNQFFLKLSS
VTTEDTATYFCARHYGSSGAMDYWGQGTSVTVSSD
NT
40.2.220-hmtIgG1-hCD80(nucleotide sequence)
aagcttatggattttcaagtgcagattttcagcttcctgctaatcagtgcttcagtcataatgtccagaggagtcgacattgttctgactca
gtctccagccaccctgtctgtgactccaggagatagagtctctctttcctgcagggccagccagagtattagcgactacttacactggt
atcaacaaaaatcacatgagtctccaaggcttctcatcaaatatgcttcccattccatctctgggatcccctccaggttcagtggcagtg
gatcagggtcagatttcactctcagtatcaacagtgtggaacctgaagatgttggaatttattactgtcaacatggtcacagctttccgtg
gacgttcggtggaggcaccaagctggaaatcaaacggggtggcggtggctcgggcggaggtgggtcgggtggcggcggatctc
agatccagttggtgcaatctggacctgagctgaagaagcctggagagacagtcaggatctcctgcaaggcttctgggtatgccttcac
aactactggaatgcagtgggtgcaagagatgccaggaaagggtttgaagtggattggctggataaacaccccactctggagtgcca
aaatatgtagaagacttcaaggacggtttgccttctctttggaaacctctgccaacactgcatatttacagataagcaacctcaaagatg
aggacacggctacgtatttctgtgtgagatccgggaatggtaactatgacctggcctactttgcttactggggccaagggacactggt
cactgtctctgatctggagcccaaatcttctgacaaaactcacacatccccaccgtccccagcacctgaactcctggggggatcgtca
gtcttcctcttccccccaaaacccaaggacaccctcatgatctcccggacccctgaggtcacatgcgtggtggtggacgtgagccac
gaagaccctgaggtcaagttcaactggtacgtggacggcgtggaggtgcataatgccaagacaaagccgcgggaggagcagtac
aacagcacgtaccgtgtggtcagcgtcctcaccgtcctgcaccaggactggctgaatggcaaggagtacaagtgcaaggtctccaa
caaagccctcccagcccccatcgagaaaaccatctccaaagccaaagggcagccccgagaaccacaggtgtacaccctgccccc
atcccgggatgagctgaccaagaaccaggtcagcctgacctgcctggtcaaaggcttctatcccagcgacatcgccgtggagtggg
agagcaatgggcagccggagaacaactacaagaccacgcctcccgtgctggactccgacggctccttcttcctctacagcaagctc
accgtggacaagagcaggtggcagcaggggaacgtcttctcatgctccgtgatgcatgaggctctgcacaaccactacacgcaga
agagcctctccctgtctccgggtaaagcggatccttcgaacctgctcccatcctgggccattaccttaatctcagtaaatggaatttttgt
gatatgctgcctgacctactgctttgccccaagatgcagagagagaaggaggaatgagagattgagaagggaaagtgtacgccctg
tataaatcgat
AA
40.2.220-hmtIgG1-hCD80(amino acid sequence)
MDFQVQIFSFLLISASVIMSRGVDIVLTQSPATLSVTPGDRVSLSCRASQSISDYLHW
YQQKSHESPRLLIKYASHSISGIPSRFSGSGSGSDFTLSINSVEPEDVGIYYCQHGHSFP
WTFGGGTKLEIKRGGGGSGGGGSGGGGSQIQLVQSGPELKKPGETVRISCKASGYA
FTTTGMQWVQEMPGKGLKWIGWINTPLWSAKICRRLQGRFAFSLETSANTAYLQIS
NLKDEDTATYFCVRSGNGNYDLAYFAYWGQGTLVTVSDLEPKSSDKTHTSPPSPAP
ELLGGSSVFLFPPKPKDTLMISRTPEVTCVVVDVSHEDPEVKFNWYVDGVEVHNAK
TKPREEQYNSTYRVVSVLTVLHQDWLNGKEYKCKVSNKALPAPIEKTISKAKGQPR
EPQVYTLPPSRDELTKNQVSLTCLVKGFYPSDIAVEWESNGQPENNYKTTPPVLDSD
GSFFLYSKLTVDKSRWQQGNVFSCSVMHEALHNHYTQKSLSLSPGKADPSNLLPSW
AITLISVNGIFVICCLTYCFAPRCRERRRNERLRRESVRPV
NT
2e12scFv-hmtIgG1-CD80 fusion protein(nucleotide sequence)
aagcttatggattttcaagtgcagattttcagcttcctgctaatcagtgcttcagtcataatgtccagaggagtcgacattgtgctcaccca
atctccagcttctttggctgtgtctctaggtcagagagccaccatctcctgcagagccagtgaaagtgttgaatattatgtcacaagttta
atgcagtggtaccaacagaaaccaggacagccacccaaactcctcatctctgctgcatccaacgtagaatctggggtccctgccagg
tttagtggcagtgggtctgggacagacttcagcctcaacatccatcctgtggaggaggatgatattgcaatgtatttctgtcagcaaagt
aggaaggttccttggacgttcggtggaggcaccaagctggaaatcaaacggggtggcggtggctcgggcggaggtgggtcgggt
ggcggcggatctcaggtgcagctgaaggagtcaggacctggcctggtggcgccctcacagagcctgtccatcacatgcaccgtct
cagggttctcattaaccggctatggtgtaaactgggttcgccagcctccaggaaagggtctggagtggctgggaatgatatggggtg
atggaagcacagactataattcagctctcaaatccagactgagcatcaccaaggacaactccaagagccaagttttcttaaaaatgaa
cagtctgcaaactgatgacacagccagatactactgtgccagagatggttatagtaactttcattactatgttatggactactggggtcaa
ggaacctcagtcaccgtctcctcagatctggagcccaaatcttctgacaaaactcacacatccccaccgtccccagcacctgaactcc
tggggggatcgtcagtcttcctcttccccccaaaacccaaggacaccctcatgatctcccggacccctgaggtcacatgcgtggtggt
ggacgtgagccacgaagaccctgaggtcaagttcaactggtacgtggacggcgtggaggtgcataatgccaagacaaagccgcg
ggaggagcagtacaacagcacgtaccgtgtggtcagcgtcctcaccgtcctgcaccaggactggctgaatggcaaggagtacaag
tgcaaggtctccaacaaagccctcccagcccccatcgagaaaaccatctccaaagccaaagggcagccccgagaaccacaggtgt
acaccctgcccccatcccgggatgagctgaccaagaaccaggtcagcctgacctgcctggtcaaaggcttctatcccagcgacatc
gccgtggagtgggagagcaatgggcagccggagaacaactacaagaccacgcctcccgtgctggactccgacggctccttcttcc
tctacagcaagctcaccgtggacaagagcaggtggcagcaggggaacgtcttctcatgctccgtgatgcatgaggctctgcacaac
cactacacgcagaagagcctctccctgtctccgggtaaagcggatccttcgaacctgctcccatcctgggccattaccttaatctcagt
aaatggaatttttgtgatatgctgcctgacctactgctttgccccaagatgcagagagagaaggaggaatgagagattgagaaggga
aagtgtacgccctgtataaatcgat
AA
2e12scFv-hmtIgG1-CD80 fusion protein(amino acid sequence)
MDFQVQIFSFLLISASVIMSRGVDIVLTQSPASLAVSLGQRATISCRASESVEYYVTSL
MQWYQQKPGQPPKLLISAASNVESGVPARFSGSGSGTDFSLNIHPVEEDDIAMYFCQ
QSRKVPWTFGGGTKLEIKRGGGGSGGGGSGGGGSQVQLKESGPGLVAPSQSLSITC
TVSGFSLTGYGVNWVRQPPGKGLEWLGMIWGDGSTDYNSALKSRLSITKDNSKSQ
VFLKMNSLQTDDTARYYCARDGYSNFHYYVMDYWGQGTSVTVSSDLEPKSSDKT
HTSPPSPAPELLGGSSVFLFPPKPKDTLMISRTPEVTCVVVDVSHEDPEVKFNWYVD
GVEVHNAKTKPREEQYNSTYRVVSVLTVLHQDWLNGKEYKCKVSNKALPAPIEKT
ISKAKGQPREPQVYTLPPSRDELTKNQVSLTCLVKGFYPSDIAVEWESNGQPENNYK
TTPPVLDSDGSFFLYSKLTVDKSRWQQGNVFSCSVMHEALHNHYTQKSLSLSPGKA
DPSNLLPSWAITLISVNGIFVICCLTYCFAPRCRERRRNERLRRESVRPV
NT
10A8 scFv-hmtIgG1-CD80(nucleotide sequence)
aagcttatggattttcaagtgcagattttcagcttcctgctaatcagtgcttcagtcataatgtccagaggagtcgacatccagatgacac
agtctccatcctcactgtctgcatctctgggaggcaaagtcaccatcacttgcaaggcaagccaagacattaagaagtatataggttgg
taccaacacaagcctggaaaaggtcccaggctgctcatatattacacatctacattacagccaggcatcccatcaaggttcagtggaa
gtgggtctgggagagattattccctcagcatcagaaacctggagcctgaagatattgcaacttattattgtcaacagtatgataatcttcc
attgacgttcggctcggggacaaagttggaaataaaacggggtggcggtggctcgggcggtggtgggtcgggtggcggcggatct
gatgtacagcttcaggagtcaggacctggcctcgtgaaaccttctcagtctctgtctctcacctgctctgtcactggctactccatcacc
agtggtttctactggaactggatccgacagtttccgggaaacaaactggaatggatgggccacataagccacgacggtaggaataac
tacaacccatctctcataaatcgaatctccatcactcgtgacacatctaagaaccagtttttcctgaagttgagttctgtgactactgagga
cacagctacatatttctgtgcaagacactacggtagtagcggagctatggactactggggtcaaggaacctcagtcaccgtctcctct
gatctggagcccaaatcttctgacaaaactcacacatccccaccgtccccagcacctgaactcctggggggatcgtcagtcttcctctt
ccccccaaaacccaaggacaccctcatgatctcccggacccctgaggtcacatgcgtggtggtggacgtgagccacgaagaccct
gaggtcaagttcaactggtacgtggacggcgtggaggtgcataatgccaagacaaagccgcgggaggagcagtacaacagcacg
taccgtgtggtcagcgtcctcaccgtcctgcaccaggactggctgaatggcaaggagtacaagtgcaaggtctccaacaaagccct
cccagcccccatcgagaaaaccatctccaaagccaaagggcagccccgagaaccacaggtgtacaccctgcccccatcccggga
tgagctgaccaagaaccaggtcagcctgacctgcctggtcaaaggcttctatcccagcgacatcgccgtggagtgggagagcaatg
ggcagccggagaacaactacaagaccacgcctcccgtgctggactccgacggctccttcttcctctacagcaagctcaccgtggac
aagagcaggtggcagcaggggaacgtcttctcatgctccgtgatgcatgaggctctgcacaaccactacacgcagaagagcctctc
cctgtctccgggtaaagcggatccttcgaacctgctcccatcctgggccattaccttaatctcagtaaatggaatttttgtgatatgctgc
ctgacctactgctttgccccaagatgcagagagagaaggaggaatgagagattgagaagggaaagtgtacgccctgtataaatcgat
AA
10A8 scFv-hmtIgG1-CD80(amino acid sequence)
MDFQVQIFSFLLISASVIMSRGVDIQMTQSPSSLSASLGGKVTITCKASQDIKKYIGW
YQHKPGKGPRLLIYYTSTLQPGIPSRFSGSGSGRDYSLSIRNLEPEDIATYYCQQYDN
LPLTFGSGTKLEIKRGGGGSGGGGSGGGGSDVQLQESGPGLVKPSQSLSLTCSVTGY
SITSGFYWNWIRQFPGNKLEWMGHISHDGRNNYNPSLINRISITRDTSKNQFFLKLSS
VTTEDTATYFCARHYGSSGAMDYWGQGTSVTVSSDLEPKSSDKTHTSPPSPAPELL
GGSSVFLFPPKPKDTLMISRTPEVTCVVVDVSHEDPEVKFNWYVDGVEVHNAKTKP
REEQYNSTYRVVSVLTVLHQDWLNGKEYKCKVSNKALPAPIEKTISKAKGQPREPQ
VYTLPPSRDELTKNQVSLTCLVKGFYPSDIAVEWESNGQPENNYKTTPPVLDSDGSF
FLYSKLTVDKSRWQQGNVFSCSVMHEALHNHYTQKSLSLSPGKADPSNLLPSWAIT
LISVNGIFVICCLTYCFAPRCRERRRNERLRRESVRPV
NT
500A2-hmtIgG1-CD80(nucleotide sequence)
atgttgtatacatctcagctccttgggcttttactcttctggatttcagcctccagaagtgacatagtgctgactcagactccagccactct
gtctctaattcctggagaaagagtcacaatgacctgtaagaccagtcagaatattggcacaatcttacactggtatcaccaaaaaccaa
aggaggctccaagggctctcatcaagtatgcttcgcagtccattcctgggatcccctccagattcagtggcagtggttcggaaacaga
tttcactctcagcatcaataacctggagcctgatgatatcggaatttattactgtcaacaaagtagaagctggcctgtcacgttcggtcct
ggcaccaagctggagataaaacggggtggcggtggctcgggcggaggtgggtcgggtggcggcggatctcaggtcaagctgca
gcagtccggttctgaactagggaaacctggggcctcagtgaaactgtcctgcaagacttcaggctacatattcacagatcactatattt
cttgggtgaaacagaagcctggagaaagcctgcagtggataggaaatgtttatggtggaaatggtggtacaagctacaatcaaaaatt
ccagggcaaggccacactgactgtagataaaatctctagcacagcctacatggaactcagcagcctgacatctgaggattctgccat
ctattactgtgcaagaaggccggtagcgacgggccatgctatggactactggggtcaggggatccaagttaccgtctcctctgatctg
gagcccaaatcttctgacaaaactcacacatccccaccgtccccagcacctgaactcctggggggatcgtcagtcttcctcttccccc
caaaacccaaggacaccctcatgatctcccggacccctgaggtcacatgcgtggtggtggacgtgagccacgaagaccctgaggt
caagttcaactggtacgtggacggcgtggaggtgcataatgccaagacaaagccgcgggaggagcagtacaacagcacgtaccg
tgtggtcagcgtcctcaccgtcctgcaccaggactggctgaatggcaaggagtacaagtgcaaggtctccaacaaagccctcccag
cccccatcgagaaaaccatctccaaagccaaagggcagccccgagaaccacaggtgtacaccctgcccccatcccgggatgagc
tgaccaagaaccaggtcagcctgacctgcctggtcaaaggcttctatcccagcgacatcgccgtggagtgggagagcaatgggca
gccggagaacaactacaagaccacgcctcccgtgctggactccgacggctccttcttcctctacagcaagctcaccgtggacaaga
gcaggtggcagcaggggaacgtcttctcatgctccgtgatgcatgaggctctgcacaaccactacacgcagaagagcctctccctgt
ctccgggtaaagcggatccttcgaacctgctcccatcctgggccattaccttaatctcagtaaatggaatttttgtgatatgctgcctgac
ctactgctttgccccaagatgcagagagagaaggaggaatgagagattgagaagggaaagtgtacgccctgtataaatcgat
AA
500A2-hmtIgG1-CD80(amino acid sequence)
MLYTSQLLGLLLFWISASRSDIVLTQTPATLSLIPGERVTMTCKTSQNIGTILHWYHQ
KPKEAPRALIKYASQSIPGIPSRFSGSGSETDFTLSINNLEPDDIGIYYCQQSRSWPVTF
GPGTKLEIKRGGGGSGGGGSGGGGSQVKLQQSGSELGKPGASVKLSCKTSGYIFTD
HYISWVKQKPGESLQWIGNVYGGNGGTSYNQKFQGKATLTVDKISSTAYMELSSLT
SEDSAIYYCARRPVATGHAMDYWGQGIQVTVSSDLEPKSSDKTHTSPPSPAPELLGG
SSVFLFPPKPKDTLMISRTPEVTCVVVDVSHEDPEVKFNWYVDGVEVHNAKTKPRE
EQYNSTYRVVSVLTVLHQDWLNGKEYKCKVSNKALPAPIEKTISKAKGQPREPQVY
TLPPSRDELTKNQVSLTCLVKGFYPSDIAVEWESNGQPENNYKTTPPVLDSDGSFFL
YSKLTVDKSRWQQGNVFSCSVMHEALHNHYTQKSLSLSPGKADPSNLLPSWAITLI
SVNGIFVICCLTYCFAPRCRERRRNERLRRESVRPV
NT
2H7 scFv MTH(SSS)WTCH2CH3(nucleotide sequence)
aagcttgccgccatggattttcaagtgcagattttcagcttcctgctaatcagtgcttcagtcataattgccagaggacaaattgttctctc
ccagtctccagcaatcctgtctgcatctccaggggagaaggtcacaatgacttgcagggccagctcaagtgtaagttacatgcactgg
taccagcagaagccaggatcctcccccaaaccctggatttatgccccatccaacctggcttctggagtccctgctcgcttcagtggca
gtgggtctgggacctcttactctctcacaatcagcagagtggaggctgaagatgctgccacttattactgccagcagtggagttttaac
ccacccacgttcggtgctgggaccaagctggagctgaaagatggcggtggctcgggcggtggtggatctggaggaggtgggagc
tctcaggcttatctacagcagtctggggctgagctggtgaggcctggggcctcagtgaagatgtcctgcaaggcttctggctacacat
ttaccagttacaatatgcactgggtaaagcagacacctagacagggcctggaatggattggagctatttatccaggaaatggtgatact
tcctacaatcagaagttcaagggcaaggccacactgactgtagacaaatcctccagcacagcctacatgcagctcagcagcctgac
atctgaagactctgcggtctatttctgtgcaagagtggtgtactatagtaactcttactggtacttcgatgtctggggcacagggaccac
ggtcaccgtctcttctgatcaggagcccaaatcttctgacaaaactcacacatccccaccgtccccagcacctgaactcctgggggga
ccgtcagtcttcctcttccccccaaaacccaaggacaccctcatgatctcccggacccctgaggtcacatgcgtggtggtggacgtga
gccacgaagaccctgaggtcaagttcaactggtacgtggacggcgtggaggtgcataatgccaagacaaagccgcgggaggagc
agtacaacagcacgtaccgtgtggtcagcgtcctcaccgtcctgcaccaggactggctgaatggcaaggagtacaagtgcaaggtc
tccaacaaagccctcccagcccccatcgagaaaacaatctccaaagccaaagggcagccccgagaaccacaggtgtacaccctg
cccccatcccgggatgagctgaccaagaaccaggtcagcctgacctgcctggtcaaaggcttctatcccagcgacatcgccgtgga
gtgggagagcaatgggcagccggagaacaactacaagaccacgcctcccgtgctggactccgacggctccttcttcctctacagca
agctcaccgtggacaagagcaggtggcagcaggggaacgtcttctcatgctccgtgatgcatgaggctctgcacaaccactacacg
cagaagagcctctccctgtctccgggtaaatgatctaga
AA
2H7 scFv MTH(SSS)WTCH2CH3(amino acid sequence)
MDFQVQIFSFLLISASVIIARGQIVLSQSPAILSASPGEKVTMTCRASSSVSYMHWYQ
QKPGSSPKPWIYAPSNLASGVPARFSGSGSGTSYSLTISRVEAEDAATYYCQQWSFN
PPTFGAGTKLELKDGGGSGGGGSGGGGSSQAYLQQSGAELVRPGASVKMSCKASG
YTFTSYNMHWVKQTPRQGLEWIGAIYPGNGDTSYNQKFKGKATLTVDKSSSTAYM
QLSSLTSEDSAVYFCARVVYYSNSYWYFDVWGTGTTVTVSSDQEPKSSDKTHTSPP
SPAPELLGGPSVFLFPPKPKDTLMISRTPEVTCVVVDVSHEDPEVKFNWYVDGVEV
HNAKTKPREEQYNSTYRVVSVLTVLHQDWLNGKEYKCKVSNKALPAPIEKTISKA
KGQPREPQVYTLPPSRDELTKNQVSLTCLVKGFYPSDIAVEWESNGQPENNYKTTPP
VLDSDGSFFLYSKLTVDKSRWQQGNVFSCSVMHEALHNHYTQKSLSLSPGK
NT
HuIgGMHncs1 (oligo for CSS)(nucleotide sequence)
gtt gtt gat cag gag ccc aaa tct tgt gac aaa act cac
NT
HuIgGMHncs2 (oligo for SCS = ncs2)(nucleotide sequence)
gtt gtt gat cag gag ccc aaa tct tct gac aaa act cac aca tgc cca ccg
NT
HuIgGMHncs3 (oligo for SSC = ncs3)(nucleotide sequence)
gtt gtt gat cag gag ccc aaa tct tct gac aaa act cac aca tct cca ccg tgc cca gca cct g
NT
hIgGWT3xba (3′ oligo for above mutation introduction)(nucleotide sequence)
gtt gtt tct aga tca ttt acc cgg aga cag gga gag gct ctt ctg cgt gta g
NT
Vhser11: (oligo for Leu to Ser at VH11)(nucleotide sequence)
gga ggt ggg agc tct cag gct tat cta cag cag tct ggg gct gag tcg gtg agg cc
NT
huIgG1-3′ (3′ oligo to amplify IgG1 C regions, 3′ end of CH3)(nucleotide sequence)
gtc tct aga cta tca ttt acc cgg aga cag
NT
huIgA/Gchim5 (oligo for pcr#1)(nucleotide sequence)
cca tct ccc tca act cca cct acc cca tct ccc tca tgc gca cct gaa ctc ctg
NT
huIgAhg-5′ (oligo for pcr#2)(nucleotide sequence)
gtt gtt gat cag cca gtt ccc tca act cca cct acc cca tct ccc caa ct
NT
huIgA3′ (nucleotide sequence)
gtt gtt tct aga tta tca gta gca ggt gcc gtc cac ctc cgc cat gac aac
NT
2H7 scFv IgAH IGG WT CH2CH3(2H7 scFv with IgA hinge and WT CH2 and CH3)
(nucleotide sequence)
aagcttgccgccatggattttcaagtgcagattttcagcttcctgctaatcagtgcttcagtcataattgccagaggacaaattgttctctc
ccagtctccagcaatcctgtctgcatctccaggggagaaggtcacaatgacttgcagggccagctcaagtgtaagttacatgcactgg
taccagcagaagccaggatcctcccccaaaccctggatttatgccccatccaacctggcttctggagtccctgctcgcttcagtggca
gtgggtctgggacctcttactctctcacaatcagcagagtggaggctgaagatgctgccacttattactgccagcagtggagttttaac
ccacccacgttcggtgctgggaccaagctggagctgaaagatggcggtggctcgggcggtggtggatctggaggaggtgggagc
tctcaggcttatctacagcagtctggggctgagctggtgaggcctggggcctcagtgaagatgtcctgcaaggcttctggctacacat
ttaccagttacaatatgcactgggtaaagcagacacctagacagggcctggaatggattggagctatttatccaggaaatggtgatact
tcctacaatcagaagttcaagggcaaggccacactgactgtagacaaatcctccagcacagcctacatgcagctcagcagcctgac
atctgaagactctgcggtctatttctgtgcaagagtggtgtactatagtaactcttactggtacttcgatgtctggggcacagggaccac
ggtcaccgtctctgatcagccagttccctcaactccacctaccccatctccctcaactccacctaccccatctccctcatgcgcacctga
actcctggggggaccgtcagtcttcctcttccccccaaaacccaaggacaccctcatgatctcccggacccctgaggtcacatgcgt
ggtggtggacgtgagccacgaagaccctgaggtcaagttcaactggtacgtggacggcgtggaggtgcataatgccaagacaaag
ccgcgggaggagcagtacaacagcacgtaccgtgtggtcagcgtcctcaccgtcctgcaccaggactggctgaatggcaaggagt
acaagtgcaaggtctccaacaaagccctcccagcccccatcgagaaaacaatctccaaagccaaagggcagccccgagaaccac
aggtgtacaccctgcccccatcccgggatgagctgaccaagaaccaggtcagcctgacctgcctggtcaaaggcttctatcccagc
gacatcgccgtggagtgggagagcaatgggcagccggagaacaactacaagaccacgcctcccgtgctggactccgacggctcc
ttcttcctctacagcaagctcaccgtggacaagagcaggtggcagcaggggaacgtcttctcatgctccgtgatgcatgaggctctgc
acaaccactacacgcagaagagcctctccctgtctccgggtaaatgatctaga
AA
2H7 scFv IgAH IGG WT CH2CH3(amino acid sequence)
MDFQVQIFSFLLISASVIIARGQIVLSQSPAILSASPGEKVTMTCRASSSVSYMHWYQ
QKPGSSPKPWIYAPSNLASGVPARFSGSGSGTSYSLTISRVEAEDAATYYCQQWSFN
PPTFGAGTKLELKDGGGSGGGGSGGGGSSQAYLQQSGAELVRPGASVKMSCKASG
YTFTSYNMHWVKQTPRQGLEWIGAIYPGNGDTSYNQKFKGKATLTVDKSSSTAYM
QLSSLTSEDSAVYFCARVVYYSNSYWYFDVWGTGTTVTVSDQPVPSTPPTPSPSTPP
TPSPSCAPELLGGPSVFLFPPKPKDTLMISRTPEVTCVVVDVSHEDPEVKFNWYVDG
VEVHNAKTKPREEQYNSTYRVVSVLTVLHQDWLNGKEYKCKVSNKALPAPIEKTIS
KAKGQPREPQVYTLPPSRDELTKNQVSLTCLVKGFYPSDIAVEWESNGQPENNYKT
TPPVLDSDGSFFLYSKLTVDKSRWQQGNVFSCSVMHEALHNHYTQKSLSLSPGK
NT
2H7 scFv IgAH IgACH2CH3(2H7 scFv IgAhinge and IgA CH2 and CH3) (nucleotide
sequence)
aagcttgccgccatggattttcaagtgcagattttcagcttcctgctaatcagtgcttcagtcataattgccagaggacaaattgttctctc
ccagtctccagcaatcctgtctgcatctccaggggagaaggtcacaatgacttgcagggccagctcaagtgtaagttacatgcactgg
taccagcagaagccaggatcctcccccaaaccctggatttatgccccatccaacctggcttctggagtccctgctcgcttcagtggca
gtgggtctgggacctcttactctctcacaatcagcagagtggaggctgaagatgctgccacttattactgccagcagtggagttttaac
ccacccacgttcggtgctgggaccaagctggagctgaaagatggcggtggctcgggcggtggtggatctggaggaggtgggagc
tctcaggcttatctacagcagtctggggctgagctggtgaggcctggggcctcagtgaagatgtcctgcaaggcttctggctacacat
ttaccagttacaatatgcactgggtaaagcagacacctagacagggcctggaatggattggagctatttatccaggaaatggtgatact
tcctacaatcagaagttcaagggcaaggccacactgactgtagacaaatcctccagcacagcctacatgcagctcagcagcctgac
atctgaagactctgcggtctatttctgtgcaagagtggtgtactatagtaactcttactggtacttcgatgtctggggcacagggaccac
ggtcaccgtctcttctgatcagccagttccctcaactccacctaccccatctccctcaactccacctaccccatctccctcatgctgccac
ccccgactgtcactgcaccgaccggccctcgaggacctgctcttaggttcagaagcgatcctcacgtgcacactgaccggcctgag
agatgcctcaggtgtcaccttcacctggacgccctcaagtgggaagagcgctgttcaaggaccacctgaccgtgacctctgtggctg
ctacagcgtgtccagtgtcctgccgggctgtgccgagccatggaaccatgggaagaccttcacttgcactgctgcctaccccgagtc
caagaccccgctaaccgccaccctctcaaaatccggaaacacattccggcccgaggtccacctgctgccgccgccgtcggaggag
ctggccctgaacgagctggtgacgctgacgtgcctggcacgtggcttcagccccaaggatgtgctggttcgctggctgcaggggtc
acaggagctgccccgcgagaagtacctgacttgggcatcccggcaggagcccagccagggcaccaccaccttcgctgtgaccag

[0855] catactgcgcgtggcagccgaggactggaagaagggggacaccttctcctgcatggtgggccacgaggccctgccgctggccttc
acacagaagaccatcgaccgcttggcgggtaaacccacccatgtcaatgtgtctgttgtcatggcggaggtggacggcacctgctac
tgataatctaga
AA
2H7 scFv IgAH IgACH2CH3(2H7 scFv IgA hinge and IgA CH2 and CH3) (amino acid
sequence)
MDFQVQIFSFLLISASVIIARGQIVLSQSPAILSASPGEKVTMTCRASSSVSYMHWYQ
QKPGSSPKPWIYAPSNLASGVPARFSGSGSGTSYSLTISRVEAEDAATYYCQQWSFN
PPTFGAGTKLELKDGGGSGGGGSGGGGSSQAYLQQSGAELVRPGASVKMSCKASG
YTFTSYNMHWVKQTPRQGLEWIGAIYPGNGDTSYNQKFKGKATLTVDKSSSTAYM
QLSSLTSEDSAVYFCARVVYYSNSYWYFDVWGTGTTVTVSSDQPVPSTPPTPSPSTP
PTPSPSCCHPRLSLHRPALEDLLLGSEAILTCTLTGLRDASGVTFTWTPSSGKSAVQG
PPDRDLCGCYSVSSVLPGCAEPWNHGKTFTCTAAYPESKTPLTATLSKSGNTFRPEV
HLLPPPSEELALNELVTLTCLARGFSPKDVLVRWLQGSQELPREKYLTWASRQEPSQ
GTTTFAVTSILRVAAEDWKKGDTFSCMVGHEALPLAFTQKTIDRLAGKPTHVNVSV
VMAEVDGTCY
NT
IgA hinge-CH2-CH3(Human IgA tail, full length) (nucleotide sequence)
tgatcagccagttccctcaactccacctaccccatctccctcaactccacctaccccatctccctcatgctgccacccccgactgtcact
gcaccgaccggccctcgaggacctgctcttaggttcagaagcgatcctcacgtgcacactgaccggcctgagagatgcctcaggtg
tcaccttcacctggacgccctcaagtgggaagagcgctgttcaaggaccacctgaccgtgacctctgtggctgctacagcgtgtcca
gtgtcctgccgggctgtgccgagccatggaaccatgggaagaccttcacttgcactgctgcctaccccgagtccaagaccccgcta
accgccaccctctcaaaatccggaaacacattccggcccgaggtccacctgctgccgccgccgtcggaggagctggccctgaacg
agctggtgacgctgacgtgcctggcacgtggcttcagccccaaggatgtgctggttcgctggctgcaggggtcacaggagctgccc
cgcgagaagtacctgacttgggcatcccggcaggagcccagccagggcaccaccaccttcgctgtgaccagcatactgcgcgtgg
cagccgaggactggaagaagggggacaccttctcctgcatggtgggccacgaggccctgccgctggccttcacacagaagacca
tcgaccgcttggcgggtaaacccacccatgtcaatgtgtctgttgtcatggcggaggtggacggcacctgctactgataatctaga
AA
IgA hinge-CH2-CH3 (Human IgA tail, full length) (amino acid sequence)
DQPVPSTPPTPSPSTPPTPSPSCCHPRLSLHRPALEDLLLGSEAILTCTLTGLRDASGVT
FTWTPSSGKSAVQGPPDRDLCGCYSVSSVLPGCAEPWNHGKTFTCTAAYPESKTPL
TATLSKSGNTFRPEVHLLPPPSEELALNELVTLTCLARGFSPKDVLVRWLQGSQELP
REKYLTWASRQEPSQGTTTFAVTSILRVAAEDWKKGDTFSCMVGHEALPLAFTQKT
IDRLAGKPTHVNVSVVMAEVDGTCY
NT
Human J Chain(nucleotide sequence)
agatctcaagaagatgaaaggattgttcttgttgacaacaaatgtaagtgtgcccggattacttccaggatcatccgttcttccgaagatc
ctaatgaggacattgtggagagaaacatccgaattattgttcctctgaacaacagggagaatatctctgatcccacctcaccattgaga
accagatttgtgtaccatttgtctgacctcagctgtaaaaaatgtgatcctacagaagtggagctggataatcagatagttactgctaccc
agagcaatatctgtgatgaagacagtgctacagagacctgctacacttatgacagaaacaagtgctacacagctgtggtcccactcgt
atatggtggtgagaccaaaatggtggaaacagccttaaccccagatgcctgctatcctgactaatctaga
AA
Human J Chain(amino acid sequence)
RSQEDERIVLVDNKCKCARITSRIIRSSEDPNEDIVERNIRIIVPLNNRENISDPTSPLRT
RFVYHLSDLSCKKCDPTEVELDNQIVTATQSNICDEDSATETCYTYDRNKCYTAVV
PLVYGGETKMVETALTPDACYP
NT
HUJCH5nl (J chain 5′ primer)(nucleotide sequence)
gtt gtt aga tct caa gaa gat gaa agg att gtt ctt
NT
HUJCH3 (J chain 3′ primer-antisense)(nucleotide sequence)
gtt gtt tct aga tta gtc agg ata gca ggc atc tgg
AA
4 carboxy terminal amino acids deleted from IgA CH3(amino acid sequence)
GTCY
NT
IgAH IgAT4(human IgA tail, truncated (3T1)-(missing last 4 amino acids from carboxy
terminus) (nucleotide sequence)
tgatcagccagttccctcaactccacctaccccatctccctcaactccacctaccccatctccctcatgctgccacccccgactgtcact
gcaccgaccggccctcgaggacctgctcttaggttcagaagcgatcctcacgtgcacactgaccggcctgagagatgcctcaggtg
tcaccttcacctggacgccctcaagtgggaagagcgctgttcaaggaccacctgaccgtgacctctgtggctgctacagcgtgtcca
gtgtcctgccgggctgtgccgagccatggaaccatgggaagaccttcacttgcactgctgcctaccccgagtccaagaccccgcta
accgccaccctctcaaaatccggaaacacattccggcccgaggtccacctgctgccgccgccgtcggaggagctggccctgaacg
agctggtgacgctgacgtgcctggcacgtggcttcagccccaaggatgtgctggttcgctggctgcaggggtcacaggagctgccc
cgcgagaagtacctgacttgggcatcccggcaggagcccagccagggcaccaccaccttcgctgtgaccagcatactgcgcgtgg
cagccgaggactggaagaagggggacaccttctcctgcatggtgggccacgaggccctgccgctggccttcacacagaagacca
tcgaccgcttggcgggtaaacccacccatgtcaatgtgtctgttgtcatggcggaggtggactgataatctaga
AA
IgAH IgAT4(amino acid sequence)
DQPVPSTPPTPSPSTPPTPSPSCCHPRLSLHRPALEDLLLGSEAILTCTLTGLRDASGVT
FTWTPSSGKSAVQGPPDRDLCGCYSVSSVLPGCAEPWNHGKTFTCTAAYPESKTPL
TATLSKSGNTFRPEVHLLPPPSEELALNELVTLTCLARGFSPKDVLVRWLQGSQELP
REKYLTWASRQEPSQGTTTFAVTSILRVAAEDWKKGDTFSCMVGHEALPLAFTQKT
IDRLAGKPTHVNVSVVMAEVD
NT
HUIGA3T1(oligo 3′ to delete 4 amino acids at carboxy end of IgA CH3)
gtt gtt tct aga tta tca gtc cac ctc cgc cat gac aac aga cac
NT
HUIGA3T2(oligo to delete 14 aa at end of IgA-T4)
gtt gtt tct aga tta tca ttt acc cgc caa gcg gtc gat ggt ctt
NT
2H7 scFv IgAH IgAT4(2H7 scFv IgA 3T1 construct; truncates the CH3 domain at the
3′end) (nucleotide sequence)
aagcttgccgccatggattttcaagtgcagattttcagcttcctgctaatcagtgcttcagtcataattgccagaggacaaattgttctctc
ccagtctccagcaatcctgtctgcatctccaggggagaaggtcacaatgacttgcagggccagctcaagtgtaagttacatgcactgg
taccagcagaagccaggatcctcccccaaaccctggatttatgccccatccaacctggcttctggagtccctgctcgcttcagtggca
gtgggtctgggacctcttactctctcacaatcagcagagtggaggctgaagatgctgccacttattactgccagcagtggagttttaac
ccacccacgttcggtgctgggaccaagctggagctgaaagatggcggtggctcgggcggtggtggatctggaggaggtgggagc
tctcaggcttatctacagcagtctggggctgagctggtgaggcctggggcctcagtgaagatgtcctgcaaggcttctggctacacat
ttaccagttacaatatgcactgggtaaagcagacacctagacagggcctggaatggattggagctatttatccaggaaatggtgatact
tcctacaatcagaagttcaagggcaaggccacactgactgtagacaaatcctccagcacagcctacatgcagctcagcagcctgac
atctgaagactctgcggtctatttctgtgcaagagtggtgtactatagtaactcttactggtacttcgatgtctggggcacagggaccac
ggtcaccgtctcttctgatcagccagttccctcaactccacctaccccatctccctcaactccacctaccccatctccctcatgctgccac
ccccgactgtcactgcaccgaccggccctcgaggacctgctcttaggttcagaagcgatcctcacgtgcacactgaccggcctgag
agatgcctcaggtgtcaccttcacctggacgccctcaagtgggaagagcgctgttcaaggaccacctgaccgtgacctctgtggctg
ctacagcgtgtccagtgtcctgccgggctgtgccgagccatggaaccatgggaagaccttcacttgcactgctgcctaccccgagtc
caagaccccgctaaccgccaccctctcaaaatccggaaacacattccggcccgaggtccacctgctgccgccgccgtcggaggag
ctggccctgaacgagctggtgacgctgacgtgcctggcacgtggcttcagccccaaggatgtgctggttcgctggctgcaggggtc
acaggagctgccccgcgagaagtacctgacttgggcatcccggcaggagcccagccagggcaccaccaccttcgctgtgaccag
catactgcgcgtggcagccgaggactggaagaagggggacaccttctcctgcatggtgggccacgaggccctgccgctggccttc
acacagaagaccatcgaccgcttggcgggtaaacccacccatgtcaatgtgtctgttgtcatggcggaggtggactgataatctaga
AA
2H7 scFv IgAH-T4(amino acid sequence)
MDFQVQIFSFLLISASVIIARGQIVLSQSPAILSASPGEKVTMTCRASSSVSYMHWYQ
QKPGSSPKPWIYAPSNLASGVPARFSGSGSGTSYSLTISRVEAEDAATYYCQQWSFN
PPTFGAGTKLELKDGGGSGGGGSGGGGSSQAYLQQSGAELVRPGASVKMSCKASG
YTFTSYNMHWVKQTPRQGLEWIGAIYPGNGDTSYNQKFKGKATLTVDKSSSTAYM
QLSSLTSEDSAVYFCARVVYYSNSYWYFDVWGTGTTVTVSSDQPVPSTPPTPSPSTP
PTPSPSCCHPRLSLHRPALEDLLLGSEAILTCTLTGLRDASGVTFTWTPSSGKSAVQG
PPDRDLCGCYSVSSVLPGCAEPWNHGKTFTCTAAYPESKTPLTATLSKSGNTFRPEV
HLLPPPSEELALNELVTLTCLARGFSPKDVLVRWLQGSQELPREKYLTWASRQEPSQ
GTTTFAVTSILRVAAEDWKKGDTFSCMVGHEALPLAFTQKTIDRLAGKPTHVNVSV
VMAEVD
AA
14 amino acids deleted from IgAH-T4(so that total of 18 amino acids deleted from wild
type IgA CH3) (amino acid sequence)
PTHVNVSVVMAEVD
NT
IgAH IgA-T18(human IgA Tail truncated, 3T2) (nucleotide sequence)
tgatcagccagttccctcaactccacctaccccatctccctcaactccacctaccccatctccctcatgctgccacccccgactgtcact
gcaccgaccggccctcgaggacctgctcttaggttcagaagcgatcctcacgtgcacactgaccggcctgagagatgcctcaggtg
tcaccttcacctggacgccctcaagtgggaagagcgctgttcaaggaccacctgaccgtgacctctgtggctgctacagcgtgtcca
gtgtcctgccgggctgtgccgagccatggaaccatgggaagaccttcacttgcactgctgcctaccccgagtccaagaccccgcta
accgccaccctctcaaaatccggaaacacattccggcccgaggtccacctgctgccgccgccgtcggaggagctggccctgaacg
agctggtgacgctgacgtgcctggcacgtggcttcagccccaaggatgtgctggttcgctggctgcaggggtcacaggagctgccc
cgcgagaagtacctgacttgggcatcccggcaggagcccagccagggcaccaccaccttcgctgtgaccagcatactgcgcgtgg
cagccgaggactggaagaagggggacaccttctcctgcatggtgggccacgaggccctgccgctggccttcacacagaagacca
tcgaccgcttggcgggtaaa
AA
IgAH IgA-T18(amino acid sequence)
DQPVPSTPPTPSPSTPPTPSPSCCHPRLSLHRPALEDLLLGSEAILTCTLTGLRDASGVT
FTWTPSSGKSAVQGPPDRDLCGCYSVSSVLPGCAEPWNHGKTFTCTAAYPESKTPL
TATLSKSGNTFRPEVHLLPPPSEELALNELVTLTCLARGFSPKDVLVRWLQGSQELP
REKYLTWASRQEPSQGTTTFAVTSILRVAAEDWKKGDTFSCMVGHEALPLAFTQKT
IDRLAGK
NT
2H7 scFv IgAH IgAT18(human IgA Tail truncated, 3T2) (nucleotide sequence)
aagcttgccgccatggattttcaagtgcagattttcagcttcctgctaatcagtgcttcagtcataattgccagaggacaaattgttctctc
ccagtctccagcaatcctgtctgcatctccaggggagaaggtcacaatgacttgcagggccagctcaagtgtaagttacatgcactgg
taccagcagaagccaggatcctcccccaaaccctggatttatgccccatccaacctggcttctggagtccctgctcgcttcagtggca
gtgggtctgggacctcttactctctcacaatcagcagagtggaggctgaagatgctgccacttattactgccagcagtggagttttaac
ccacccacgttcggtgctgggaccaagctggagctgaaagatggcggtggctcgggcggtggtggatctggaggaggtgggagc
tctcaggcttatctacagcagtctggggctgagctggtgaggcctggggcctcagtgaagatgtcctgcaaggcttctggctacacat
ttaccagttacaatatgcactgggtaaagcagacacctagacagggcctggaatggattggagctatttatccaggaaatggtgatact
tcctacaatcagaagttcaagggcaaggccacactgactgtagacaaatcctccagcacagcctacatgcagctcagcagcctgac
atctgaagactctgcggtctatttctgtgcaagagtggtgtactatagtaactcttactggtacttcgatgtctggggcacagggaccac
ggtcaccgtctcttctgatcagccagttccctcaactccacctaccccatctccctcaactccacctaccccatctccctcatgctgccac
ccccgactgtcactgcaccgaccggccctcgaggacctgctcttaggttcagaagcgatcctcacgtgcacactgaccggcctgag
agatgcctcaggtgtcaccttcacctggacgccctcaagtgggaagagcgctgttcaaggaccacctgaccgtgacctctgtggctg
ctacagcgtgtccagtgtcctgccgggctgtgccgagccatggaaccatgggaagaccttcacttgcactgctgcctaccccgagtc
caagaccccgctaaccgccaccctctcaaaatccggaaacacattccggcccgaggtccacctgctgccgccgccgtcggaggag
ctggccctgaacgagctggtgacgctgacgtgcctggcacgtggcttcagccccaaggatgtgctggttcgctggctgcaggggtc
acaggagctgccccgcgagaagtacctgacttgggcatcccggcaggagcccagccagggcaccaccaccttcgctgtgaccag
catactgcgcgtggcagccgaggactggaagaagggggacaccttctcctgcatggtgggccacgaggccctgccgctggccttc
acacagaagaccatcgaccgcttggcgggtaaa
AA
2H7 scFv IgAH IgAT18(amino acid sequence)
MDFQVQIFSFLLISASVIIARGQIVLSQSPAILSASPGEKVTMTCRASSSVSYMHWYQ
QKPGSSPKPWIYAPSNLASGVPARFSGSGSGTSYSLTISRVEAEDAATYYCQQWSFN
PPTFGAGTKLELKDGGGSGGGGSGGGGSSQAYLQQSGAELVRPGASVKMSCKASG
YTFTSYNMHWVKQTPRQGLEWIGAIYPGNGDTSYNQKFKGKATLTVDKSSSTAYM
QLSSLTSEDSAVYFCARVVYYSNSYWYFDVWGTGTTVTVSSDQPVPSTPPTPSPSTP
PTPSPSCCHPRLSLHRPALEDLLLGSEAILTCTLTGLRDASGVTFTWTPSSGKSAVQG
PPDRDLCGCYSVSSVLPGCAEPWNHGKTFTCTAAYPESKTPLTATLSKSGNTFRPEV
HLLPPPSEELALNELVTLTCLARGFSPKDVLVRWLQGSQELPREKYLTWASRQEPSQ
GTTTFAVTSILRVAAEDWKKGDTFSCMVGHEALPLAFTQKTIDRLAGK
NT
CTLA-4 IgG WTH WTCH2CH3(human-oncoMLP-CTLA4EC-hIgGWT) (nucleotide
sequence)
gcaacctacatgatggggaatgagttgaccttcctagatgattccatctgcacgggcacctccagtggaaatcaagtgaacctcactat
ccaaggactgagggccatggacacgggactctacatctgcaaggtggagctcatgtacccaccgccatactacctgggcataggca
acggaacccagatttatgtaattgatccagaaccgtgcccagattctgatcaacccaaatcttgtgacaaaactcacacatgcccaccg
tgcccagcacctgaactcctggggggaccgtcagtcttcctcttccccccaaaacccaaggacaccctcatgatctcccggacccct
gaggtcacatgcgtggtggtggacgtgagccacgaagaccctgaggtcaagttcaactggtacgtggacggcgtggaggtgcata
atgccaagacaaagccgcgggaggagcagtacaacagcacgtaccgtgtggtcagcgtcctcaccgtcctgcaccaggactggct
gaatggcaaggagtacaagtgcaaggtctccaacaaagccctcccagcccccatcgagaaaacaatctccaaagccaaagggca
gccccgagaaccacaggtgtacaccctgcccccatcccgggatgagctgaccaagaaccaggtcagcctgacctgcctggtcaaa
ggcttctatcccagcgacatcgccgtggagtgggagagcaatgggcagccggagaacaactacaagaccacgcctcccgtgctg
gactccgacggctccttcttcctctacagcaagctcaccgtggacaagagcaggtggcagcaggggaacgtcttctcatgctccgtg
atgcatgaggctctgcacaaccactacacgcagaagagcctctccctgtctccgggtaaatga
AA
CTLA-4 IgG WTH WTCH2CH3(amino acid sequence)
MGVLLTQRTLLSLVLALLFPSMASMAMHVAQPAVVLASSRGIASFVCEYASPGKAT
EVRVTVLRQADSQVTEVCAATYMMGNELTFLDDSICTGTSSGNQVNLTIQGLRAM
DTGLYICKVELMYPPPYYLGIGNGTQIYVIDPEPCPDSDQPKSCDKTHTCPPCPAPEL
LGGPSVFLFPPKPKDTLMISRTPEVTCVVVDVSHEDPEVKFNWYVDGVEVHNAKTK
PREEQYNSTYRVVSVLTVLHQDWLNGKEYKCKVSNKALPAPIEKTISKAKGQPREP
QVYTLPPSRDELTKNQVSLTCLVKGFYPSDIAVEWESNGQPENNYKTTPPVLDSDGS
FFLYSKLTVDKSRWQQGNVFSCSVMHEALHNHYTQKSLSLSPGK
NT
Human OncoM leader Peptide+CTLA4 EC (BclI)(nucleotide sequence)
atgggggtactgctcacacagaggacgctgctcagtctggtccttgcactcctgtttccaagcatggcgagcatggcaatgcacgtg
gcccagcctgctgtggtactggccagcagccgaggcatcgccagctttgtgtgtgagtatgcatctccaggcaaagccactgaggtc
cgggtgacagtgcttcggcaggctgacagccaggtgactgaagtctgtgcggcaacctacatgatggggaatgagttgaccttccta
gatgattccatctgcacgggcacctccagtggaaatcaagtgaacctcactatccaaggactgagggccatggacacgggactctac
atctgcaaggtggagctcatgtacccaccgccatactacctgggcataggcaacggaacccagatttatgtaattgatccagaaccgt
gcccagattctgatcaa
AA
Human OncoM leader Peptide+CTLA4 EC(amino acid sequence)
MGVLLTQRTLLSLVLALLFPSMASMAMHVAQPAVVLASSRGIASFVCEYASPGKAT
EVRVTVLRQADSQVTEVCAATYMMGNELTFLDDSICTGTSSGNQVNLTIQGLRAM
DTGLYICKVELMYPPPYYLGIGNGTQIYVIDPEPCPDSDQ
NT
Human OncoM leader(nucleotide sequence)
atgggggtactgctcacacagaggacgctgctcagtctggtccttgcactcctgtttccaagcatggcgagcatg
AA
Human OncoM leader(amino acid sequence)
MGVLLTQRTLLSLVLALLFPSM
NT
Human CTLA4 EC(no LP) (nucleotide sequence)
gcaatgcacgtggcccagcctgctgtggtactggccagcagccgaggcatcgccagctttgtgtgtgagtatgcatctccaggcaaa
gccactgaggtccgggtgacagtgcttcggcaggctgacagccaggtgactgaagtctgtgcggcaacctacatgacggggaatg
agttgaccttcctagatgattccatctgcacgggcacctccagtggaaatcaagtgaacctcactatccaaggactgagggccatgga
cacgggactctacatctgcaaggtggagctcatgtacccaccgccatactacctgggcataggcaacggaacccagatttatgtaatt
gatccagaaccgtgcccagattct
AA
Human CTLA4 EC (no LP) (amino acid sequence)
AMHVAQPAVVLASSRGIASFVCEYASPGKATEVRVTVLRQADSQVTEVCAATYMT
GNELTFLDDSICTGTSSGNQVNLTIQGLRAMDTGLYICKVELMYPPPYYLGIGNGTQ
IYVIDPEPCPDS
NT
Human CTLA4 IgG MTH (SSS) MTCH2CH3(nucleotide sequence)
atgggggtactgctcacacagaggacgctgctcagtctggtccttgcactcctgtttccaagcatggcgagcatggcaatgcacgtg
gcccagcctgctgtggtactggccagcagccgaggcatcgccagctttgtgtgtgagtatgcatctccaggcaaagccactgaggtc
cgggtgacagtgcttcggcaggctgacagccaggtgactgaagtctgtgcggcaacctacatgatggggaatgagttgaccttccta
gatgattccatctgcacgggcacctccagtggaaatcaagtgaacctcactatccaaggactgagggccatggacacgggactctac
atctgcaaggtggagctcatgtacccaccgccatactacctgggcataggcaacggaacccagatttatgtaattgatccagaaccgt
gcccagattctgatcaacccaaatcttctgacaaaactcacacatccccaccgtccccagcacctgaactcctggggggatcgtcagt
cttcctcttccccccaaaacccaaggacaccctcatgatctcccggacccctgaggtcacatgcgtggtggtggacgtgagccacga
agaccctgaggtcaagttcaactggtacgtggacggcgtggaggtgcataatgccaagacaaagccgcgggaggagcagtacaa
cagcacgtaccgtgtggtcagcgtcctcaccgtcctgcaccaggactggctgaatggcaaggagtacaagtgcaaggtctccaaca
aagccctcccagcccccatcgagaaaacaatctccaaagccaaagggcagccccgagaaccacaggtgtacaccctgcccccat
cccgggatgagctgaccaagaaccaggtcagcctgacctgcctggtcaaaggcttctatcccagcgacatcgccgtggagtggga
gagcaatgggcagccggagaacaactacaagaccacgcctcccgtgctggactccgacggctccttcttcctctacagcaagctca
ccgtggacaagagcaggtggcagcaggggaacgtcttctcatgctccgtgatgcatgaggctctgcacaaccactacacgcagaa
gagcctctccctgtctccgggtaaatga
AA
Human CTLA4 IgG MTH (SSS) MTCH2CH3(amino acid sequence)
MGVLLTQRTLLSLVLALLFPSMASMAMHVAQPAVVLASSRGIASFVCEYASPGKAT
EVRVTVLRQADSQVTEVCAATYMMGNELTFLDDSICTGTSSGNQVNLTIQGLRAM
DTGLYICKVELMYPPPYYLGIGNGTQIYVIDPEPCPDSDQPKSSDKTHTSPPSPAPELL
GGSSVFLFPPKPKDTLMISRTPEVTCVVVDVSHEDPEVKFNWYVDGVEVHNAKTKP
REEQYNSTYRVVSVLTVLHQDWLNGKEYKCKVSNKALPAPIEKTISKAKGQPREPQ
VYTLPPSRDELTKNQVSLTCLVKGFYPSDIAVEWESNGQPENNYKTTPPVLDSDGSF
FLYSKLTVDKSRWQQGNVFSCSVMHEALHNHYTQKSLSLSPGK
NT
CTLA-4 IgAH IgACH2CH3(human-oncoMLP-CTLA4EC-IgA) (nucleotide sequence)
atgggggtactgctcacacagaggacgctgctcagtctggtccttgcactcctgtttccaagcatggcgagcatggcaatgcacgtg
gcccagcctgctgtggtactggccagcagccgaggcatcgccagctttgtgtgtgagtatgcatctccaggcaaagccactgaggtc
cgggtgacagtgcttcggcaggctgacagccaggtgactgaagtctgtgcggcaacctacatgatggggaatgagttgaccttccta
gatgattccatctgcacgggcacctccagtggaaatcaagtgaacctcactatccaaggactgagggccatggacacgggactctac
atctgcaaggtggagctcatgtacccaccgccatactacctgggcataggcaacggaacccagatttatgtaattgatccagaaccgt
gcccagattctgatcagccagttccctcaactccacctaccccatctccctcaactccacctaccccatctccctcatgctgccaccccc
gactgtcactgcaccgaccggccctcgaggacctgctcttaggttcagaagcgatcctcacgtgcacactgaccggcctgagagat
gcctcaggtgtcaccttcacctggacgccctcaagtgggaagagcgctgttcaaggaccacctgaccgtgacctctgtggctgctac
agcgtgtccagtgtcctgccgggctgtgccgagccatggaaccatgggaagaccttcacttgcactgctgcctaccccgagtccaag
accccgctaaccgccaccctctcaaaatccggaaacacattccggcccgaggtccacctgctgccgccgccgtcggaggagctgg
ccctgaacgagctggtgacgctgacgtgcctggcacgtggcttcagccccaaggatgtgctggttcgctggctgcaggggtcacag
gagctgccccgcgagaagtacctgacttgggcatcccggcaggagcccagccagggcaccaccaccttcgctgtgaccagcata
ctgcgcgtggcagccgaggactggaagaagggggacaccttctcctgcatggtgggccacgaggccctgccgctggccttcaca
cagaagaccatcgaccgcttggcgggtaaacccacccatgtcaatgtgtctgttgtcatggcggaggtggacggcacctgctactga
taatctaga
AA
CTLA-4 IgAH IgACH2CH3(amino acid sequence)
MGVLLTQRTLLSLVLALLFPSMASMAMHVAQPAVVLASSRGIASFVCEYASPGKAT
EVRVTVLRQADSQVTEVCAATYMMGNELTFLDDSICTGTSSGNQVNLTIQGLRAM
DTGLYICKVELMYPPPYYLGIGNGTQIYVIDPEPCPDSDQPVPSTPPTPSPSTPPTPSPS
CCHPRLSLHRPALEDLLLGSEAILTCTLTGLRDASGVTFTWTPSSGKSAVQGPPDRD
LCGCYSVSSVLPGCAEPWNHGKTFTCTAAYPESKTPLTATLSKSGNTFRPEVHLLPP
PSEELALNELVTLTCLARGFSPKDVLVRWLQGSQELPREKYLTWASRQEPSQGTTTF
AVTSILRVAAEDWKKGDTFSCMVGHEALPLAFTQKTIDRLAGKPTHVNVSVVMAE
VDGTCY
NT
CTLA-4 IgAH IgA-T4(human-oncoMLP-CTLA4EC-IgA3T1) (nucleotide sequence)
atgggggtactgctcacacagaggacgctgctcagtctggtccttgcactcctgtttccaagcatggcgagcatggcaatgcacgtg
gcccagcctgctgtggtactggccagcagccgaggcatcgccagctttgtgtgtgagtatgcatctccaggcaaagccactgaggtc
cgggtgacagtgcttcggcaggctgacagccaggtgactgaagtctgtgcggcaacctacatgatggggaatgagttgaccttccta
gatgattccatctgcacgggcacctccagtggaaatcaagtgaacctcactatccaaggactgagggccatggacacgggactctac
atctgcaaggtggagctcatgtacccaccgccatactacctgggcataggcaacggaacccagatttatgtaattgatccagaaccgt
gcccagattctgatcagccagttccctcaactccacctaccccatctccctcaactccacctaccccatctccctcatgctgccaccccc
gactgtcactgcaccgaccggccctcgaggacctgctcttaggttcagaagcgatcctcacgtgcacactgaccggcctgagagat
gcctcaggtgtcaccttcacctggacgccctcaagtgggaagagcgctgttcaaggaccacctgaccgtgacctctgtggctgctac
agcgtgtccagtgtcctgccgggctgtgccgagccatggaaccatgggaagaccttcacttgcactgctgcctaccccgagtccaag
accccgctaaccgccaccctctcaaaatccggaaacacattccggcccgaggtccacctgctgccgccgccgtcggaggagctgg
ccctgaacgagctggtgacgctgacgtgcctggcacgtggcttcagccccaaggatgtgctggttcgctggctgcaggggtcacag
gagctgccccgcgagaagtacctgacttgggcatcccggcaggagcccagccagggcaccaccaccttcgctgtgaccagcata
ctgcgcgtggcagccgaggactggaagaagggggacaccttctcctgcatggtgggccacgaggccctgccgctggccttcaca
cagaagaccatcgaccgcttggcgggtaaacccacccatgtcaatgtgtctgttgtcatggcggaggtggactgataatctaga
AA
CTLA-4 IgAH IgA-T4(amino acid sequence)
MGVLLTQRTLLSLVLALLFPSMASMAMHVAQPAVVLASSRGIASFVCEYASPGKAT
EVRVTVLRQADSQVTEVCAATYMMGNELTFLDDSICTGTSSGNQVNLTIQGLRAM
DTGLYICKVELMYPPPYYLGIGNGTQIYVIDPEPCPDSDQPVPSTPPTPSPSTPPTPSPS
CCHPRLSLHRPALEDLLLGSEAILTCTLTGLRDASGVTFTWTPSSGKSAVQGPPDRD
LCGCYSVSSVLPGCAEPWNHGKTFTCTAAYPESKTPLTATLSKSGNTFRPEVHLLPP
PSEELALNELVTLTCLARGFSPKDVLVRWLQGSQELPREKYLTWASRQEPSQGTTTF
AVTSILRVAAEDWKKGDTFSCMVGHEALPLAFTQKTIDRLAGKPTHVNVSVVMAE
VD
NT
human IgG1 CH2 with 238 mutation pro→ser(nucleotide sequence)
cctgaactcctggggggatcgtcagtcttcctcttccccccaaaacccaaggacaccctcatgatctcccggacccctgaggtcacat
gcgtggtggtggacgtgagccacgaagaccctgaggtcaagttcaactggtacgtggacggcgtggaggtgcataatgccaagac
aaagccgcgggaggagcagtacaacagcacgtaccgtgtggtcagcgtcctcaccgtcctgcaccaggactggctgaatggcaa
ggagtacaagtgcaaggtctccaacaaagccctcccagcccccatcgagaaaaccatctccaaagccaaag
AA
human IgG1 CH2 with 238 mutation pro→ser(amino acid sequence)
PELLGGSSVFLFPPKPKDTLMISRTPEVTCVVVDVSHEDPEVKFNWYVDGVEVHNA
KTKPREEQYNSTYRVVSVLTVLHQDWLNGKEYKCKVSNKALPAPIEKTISKAK
AA
Amino acids surrounding Pro to Ser in CH2(amino acid sequence)
PAPEELGGPS
AA
Amino acids surrounding Pro to Ser in CH2(amino acid sequence)
PAPELLGGSS
NT
HIgE5Bcl(nucleotide sequence)
gtt gtt gat cac gtc tgc tcc agg gac ttc acc cc
NT
hIgEstop(nucleotide sequence)
gtt gtt tct aga tta act ttt acc ggg att tac aga cac cgc tcg ctg g
NT
hIgE3BB(leaves an open reading frame at end of gene to read into transmembrane
and cytoplasmic tail domain attached at either the BamHI or SfuI sites) (nucleotide
sequence)
gtt gtt ttc gaa gga tcc gct tta ccg gga ttt aca gac acc gct cgc tgg
NT
human IgE Fc (CH2-CH3-CH4) ORF(nucleotide sequence)
tgatcacgtctgctccagggacttcaccccgcccaccgtgaagatcttacagtcgtcctgcgacggcggcgggcacttccccccgac
catccagctcctgtgcctcgtctctgggtacaccccagggactatcaacatcacctggctggaggacgggcaggtcatggacgtgg
acttgtccaccgcctctaccacgcaggagggtgagctggcctccacacaaagcgagctcaccctcagccagaagcactggctgtca
gaccgcacctacacctgccaggtcacctatcaaggtcacacctttgaggacagcaccaagaagtgtgcagattccaacccgagagg
ggtgagcgcctacctaagccggcccagcccgttcgacctgttcatccgcaagtcgcccacgatcacctgtctggtggtggacctggc
acccagcaaggggaccgtgaacctgacctggtcccgggccagtgggaagcctgtgaaccactccaccagaaaggaggagaagc
agcgcaatggcacgttaaccgtcacgtccaccctgccggtgggcacccgagactggatcgagggggagacctaccagtgcaggg
tgacccacccccacctgcccagggccctcatgcggtccacgaccaagaccagcggcccgcgtgctgccccggaagtctatgcgtt
tgcgacgccggagtggccggggagccgggacaagcgcaccctcgcctgcctgatccagaacttcatgcctgaggacatctcggtg
cagtggctgcacaacgaggtgcagctcccggacgcccggcacagcacgacgcagccccgcaagaccaagggctccggcttcttc
gtcttcagccgcctggaggtgaccagggccgaatgggagcagaaagatgagttcatctgccgtgcagtccatgaggcagcgagcc
cctcacagaccgtccagcgagcggtgtctgtaaatcccggtaaagcggatccttcgaa
AA
human IgE Fc (CH2-CH3-CH4) ORF(amino acid sequence)
DHVCSRDFTPPTVKILQSSCDGGGHFPPTIQLLCLVSGYTPGTINITWLEDGQVMDV
DLSTASTTQEGELASTQSELTLSQKHWLSDRTYTCQVTYQGHTFEDSTKKCADSNP
RGVSAYLSRPSPFDLFIRKSPTITCLVVDLAPSKGTVNLTWSRASGKPVNHSTRKEEK
QRNGTLTVTSTLPVGTRDWIEGETYQCRVTHPHLPRALMRSTTKTSGPRAAPEVYA
FATPEWPGSRDKRTLACLIQNFMPEDISVQWLHNEVQLPDARHSTTQPRKTKGSGF
FVFSRLEVTRAEWEQKDEFICRAVHEAASPSQTVQRAVSVNPGKADPS
NT
IFhIgGwtBcl5(nucleotide sequence)
gtt gtt tga tca gga gcc caa atc ttg tga caa aac tca cac atg ccc acc gtg ccc agc acc (63 mer)
NT
hIgGWT3xba(nucleotide sequence)
gtt gtt tct aga tca ttt acc cgg aga cag gga gag gct ctt ctg cgt gta g
NT
HuIgGMHWC (sense, 5′ primer for mutating wild type hinge CCC to mutant SSS)
(nucleotide sequence)
gtt gtt gat cag gag ccc aaa tct tct gac aaa act cac aca tct cca ccg tcc cca gca cct gaa ctc
ctg ggt gga ccg tca gtc ttc c
NT
1D8 VH(nucleotide sequence)
caggtgcagctgaaggaggcaggacctggcctggtgcaaccgacacagaccctgtccctcacatgcactgtctctgggttctcatta
accagcgatggtgtacactggattcgacagcctccaggaaagggtctggaatggatgggaataatatattatgatggaggcacagat
tataattcagcaattaaatccagactgagcatcagcagggacacctccaagagccaagttttcttaaaaatcaacagtctgcaaactga
tgacacagccatgtattactgtgccagaatccactttgattactggggccaaggagtcatggtcacagtctcctct
AA
1D8 VH (no leader) (amino acid sequence)
QVQLKEAGPGLVQPTQTLSLTCTVSGFSLTSDGVHWIRQPPGKGLEWMGIIYYDGG
TDYNSAIKSRLSISRDTSKSQVFLKINSLQTDDTAMYYCARIHFDYWGQGVMVTVSS
NT
1D8 VL (no leader) (nucleotide sequence)
gacattgtgctcactcagtctccaacaaccatagctgcatctccaggggagaaggtcaccatcacctgccgtgccagctccagtgtaa
gttacatgtactggtaccagcagaagtcaggcgcctcccctaaactctggatttatgacacatccaagctggcttctggagttccaaatc
gcttcagtggcagtgggtctgggacctcttattctctcgcaatcaacaccatggagactgaagatgctgccacttattactgtcagcagt
ggagtagtactccgctcacgttcgggtctgggaccaagctggagatcaaacgg
AA
1D8 VL(amino acid sequence)
DIVLTQSPTTIAASPGEKVTITCRASSSVSYMYWYQQKSGASPKLWIYDTSKLASGV
PNRFSGSGSGTSYSLAINTMETEDAATYYCQQWSSTPLTFGSGTKLEIKR
NT
1D8 scFv(nucleotide sequence)
aagcttatggattttcaagtgcagattttcagcttcctgctaatcagtgcttcagtcataatgtccagaggagtcgacattgtgctcactca
gtctccaacaaccatagctgcatctccaggggagaaggtcaccatcacctgccgtgccagctccagtgtaagttacatgtactggtac
cagcagaagtcaggcgcctcccctaaactctggatttatgacacatccaagctggcttctggagttccaaatcgcttcagtggcagtg
ggtctgggacctcttattctctcgcaatcaacaccatggagactgaagatgctgccacttattactgtcagcagtggagtagtactccgc
tcacgttcgggtctgggaccaagctggagatcaaacggggtggcggtggctcgggcggtggtgggtcgggtggcggcggatctc
aggtgcagctgaaggaggcaggacctggcctggtgcaaccgacacagaccctgtccctcacatgcactgtctctgggttctcattaa
ccagcgatggtgtacactggattcgacagcctccaggaaagggtctggaatggatgggaataatatattatgatggaggcacagatt
ataattcagcaattaaatccagactgagcatcagcagggacacctccaagagccaagttttcttaaaaatcaacagtctgcaaactgat
gacacagccatgtattactgtgccagaatccactttgattactggggccaaggagtcatggtcacagtctcctctgatca
AA
1D8 scFv(amino acid sequence)
MDFQVQIFSFLLISASVIMSRGVDIVLTQSPTTIAASPGEKVTITCRASSSVSYMYWY
QQKSGASPKLWIYDTSKLASGVPNRFSGSGSGTSYSLAINTMETEDAATYYCQQWS
STPLTFGSGTKLEIKRGGGGSGGGGSGGGGSQVQLKEAGPGLVQPTQTLSLTCTVSG
FSLTSDGVHWIRQPPGKGLEWMGIIYYDGGTDYNSAIKSRLSISRDTSKSQVFLKINS
LQTDDTAMYYCARIHFDYWGQGVMVTVSS
NT
1D8 scFv IgG WTH WTCH2CH3(nucleotide sequence)
aagcttatggattttcaagtgcagattttcagcttcctgctaatcagtgcttcagtcataatgtccagaggagtcgacattgtgctcactca
gtctccaacaaccatagctgcatctccaggggagaaggtcaccatcacctgccgtgccagctccagtgtaagttacatgtactggtac
cagcagaagtcaggcgcctcccctaaactctggatttatgacacatccaagctggcttctggagttccaaatcgcttcagtggcagtg
ggtctgggacctcttattctctcgcaatcaacaccatggagactgaagatgctgccacttattactgtcagcagtggagtagtactccgc
tcacgttcgggtctgggaccaagctggagatcaaacggggtggcggtggctcgggcggtggtgggtcgggtggcggcggatctc
aggtgcagctgaaggaggcaggacctggcctggtgcaaccgacacagaccctgtccctcacatgcactgtctctgggttctcattaa
ccagcgatggtgtacactggattcgacagcctccaggaaagggtctggaatggatgggaataatatattatgatggaggcacagatt
ataattcagcaattaaatccagactgagcatcagcagggacacctccaagagccaagttttcttaaaaatcaacagtctgcaaactgat
gacacagccatgtattactgtgccagaatccactttgattactggggccaaggagtcatggtcacagtctcctctgatcaggagcccaa
atcttgtgacaaaactcacacatgcccaccgtgcccagcacctgaactcctggggggaccgtcagtcttcctcttccccccaaaaccc
aaggacaccctcatgatctcccggacccctgaggtcacatgcgtggtggtggacgtgagccacgaagaccctgaggtcaagttcaa
ctggtacgtggacggcgtggaggtgcataatgccaagacaaagccgcgggaggagcagtacaacagcacgtaccgtgtggtcag
cgtcctcaccgtcctgcaccaggactggctgaatggcaaggagtacaagtgcaaggtctccaacaaagccctcccagcccccatcg
agaaaacaatctccaaagccaaagggcagccccgagaaccacaggtgtacaccctgcccccatcccgggatgagctgaccaaga
accaggtcagcctgacctgcctggtcaaaggcttctatcccagcgacatcgccgtggagtgggagagcaatgggcagccggagaa
caactacaagaccacgcctcccgtgctggactccgacggctccttcttcctctacagcaagctcaccgtggacaagagcaggtggc
agcaggggaacgtcttctcatgctccgtgatgcatgaggctctgcacaaccactacacgcagaagagcctctccctgtctccgggta
aatgatctaga
AA
1D8 scFv IgG WTH WTCH2CH3(amino acid sequence)
MDFQVQIFSFLLISASVIMSRGVDIVLTQSPTTIAASPGEKVTITCRASSSVSYMYWY
QQKSGASPKLWIYDTSKLASGVPNRFSGSGSGTSYSLAINTMETEDAATYYCQQWS
STPLTFGSGTKLEIKRGGGGSGGGGSGGGGSQVQLKEAGPGLVQPTQTLSLTCTVSG
FSLTSDGVHWIRQPPGKGLEWMGIIYYDGGTDYNSAIKSRLSISRDTSKSQVFLKINS
LQTDDTAMYYCARIHFDYWGQGVMVTVSSDQEPKSCDKTHTCPPCPAPELLGGPS
VFLFPPKPKDTLMISRTPEVTCVVVDVSHEDPEVKFNWYVDGVEVHNAKTKPREEQ
YNSTYRVVSVLTVLHQDWLNGKEYKCKVSNKALPAPIEKTISKAKGQPREPQVYTL
PPSRDELTKNQVSLTCLVKGFYPSDIAVEWESNGQPENNYKTTPPVLDSDGSFFLYS
KLTVDKSRWQQGNVFSCSVMHEALHNHYTQKSLSLSPGK
NT
1D8 scFv IgG MTH MTCH2CH3-CD80(nucleotide sequence)
aagcttatggattttcaagtgcagattttcagcttcctgctaatcagtgcttcagtcataatgtccagaggagtcgacattgtgctcactca
gtctccaacaaccatagctgcatctccaggggagaaggtcaccatcacctgccgtgccagctccagtgtaagttacatgtactggtac
cagcagaagtcaggcgcctcccctaaactctggatttatgacacatccaagctggcttctggagttccaaatcgcttcagtggcagtg
ggtctgggacctcttattctctcgcaatcaacaccatggagactgaagatgctgccacttattactgtcagcagtggagtagtactccgc
tcacgttcgggtctgggaccaagctggagatcaaacggggtggcggtggctcgggcggtggtgggtcgggtggcggcggatctc
aggtgcagctgaaggaggcaggacctggcctggtgcaaccgacacagaccctgtccctcacatgcactgtctctgggttctcattaa
ccagcgatggtgtacactggattcgacagcctccaggaaagggtctggaatggatgggaataatatattatgatggaggcacagatt
ataattcagcaattaaatccagactgagcatcagcagggacacctccaagagccaagttttcttaaaaatcaacagtctgcaaactgat
gacacagccatgtattactgtgccagaatccactttgattactggggccaaggagtcatggtcacagtctcctctgatctggagcccaa
atcttctgacaaaactcacacaagcccaccgagcccagcacctgaactcctggggggatcgtcagtcttcctcttccccccaaaaccc
aaggacaccctcatgatctcccggacccctgaggtcacatgcgtggtggtggacgtgagccacgaagaccctgaggtcaagttcaa
ctggtacgtggacggcgtggaggtgcataatgccaagacaaagccgcgggaggagcagtacaacagcacgtaccgtgtggtcag
cgtcctcaccgtcctgcaccaggactggctgaatggcaaggagtacaagtgcaaggtctccaacaaagccctcccagcccccatcg
agaaaaccatctccaaagccaaagggcagccccgagaaccacaggtgtacaccctgcccccatcccgggatgagctgaccaaga
accaggtcagcctgacctgcctggtcaaaggcttctatcccagcgacatcgccgtggagtgggagagcaatgggcagccggagaa
caactacaagaccacgcctcccgtgctggactccgacggctccttcttcctctacagcaagctcaccgtggacaagagcaggtggc
agcaggggaacgtcttctcatgctccgtgatgcatgaggctctgcacaaccactacacgcagaagagcctctccctgtctccgggta
aagcggatccttcgaacctgctcccatcctgggccattaccttaatctcagtaaatggaatttttgtgatatgctgcctgacctactgcttt
gccccaagatgcagagagagaaggaggaatgagagattgagaagggaaagtgtacgccctgtataaatcgata
AA
1D8 scFv IgG MTH MTCH2CH3-CD80(amino acid sequence)
MDFQVQIFSFLLISASVIMSRGVDIVLTQSPTTIAASPGEKVTITCRASSSVSYMYWY
QQKSGASPKLWIYDTSKLASGVPNRFSGSGSGTSYSLAINTMETEDAATYYCQQWS
STPLTFGSGTKLEIKRGGGGSGGGGSGGGGSQVQLKEAGPGLVQPTQTLSLTCTVSG
FSLTSDGVHWIRQPPGKGLEWMGIIYYDGGTDYNSAIKSRLSISRDTSKSQVFLKINS
LQTDDTAMYYCARIHFDYWGQGVMVTVSSDLEPKSSDKTHTSPPSPAPELLGGSSV
FLFPPKPKDTLMISRTPEVTCVVVDVSHEDPEVKFNWYVDGVEVHNAKTKPREEQY
NSTYRVVSVLTVLHQDWLNGKEYKCKVSNKALPAPIEKTISKAKGQPREPQVYTLP
PSRDELTKNQVSLTCLVKGFYPSDIAVEWESNGQPENNYKTTPPVLDSDGSFFLYSK
LTVDKSRWQQGNVFSCSVMHEALHNHYTQKSLSLSPGKADPSNLLPSWAITLISVN
GIFVICCLTYCFAPRCRERRRNERLRRESVRPV
NT
1D8 scFv IgG WTH WTCH2CH3-CD80(nucleotide sequence)
aagcttatggattttcaagtgcagattttcagcttcctgctaatcagtgcttcagtcataatgtccagaggagtcgacattgtgctcactca
gtctccaacaaccatagctgcatctccaggggagaaggtcaccatcacctgccgtgccagctccagtgtaagttacatgtactggtac
cagcagaagtcaggcgcctcccctaaactctggatttatgacacatccaagctggcttctggagttccaaatcgcttcagtggcagtg
ggtctgggacctcttattctctcgcaatcaacaccatggagactgaagatgctgccacttattactgtcagcagtggagtagtactccgc
tcacgttcgggtctgggaccaagctggagatcaaacggggtggcggtggctcgggcggtggtgggtcgggtggcggcggatctc
aggtgcagctgaaggaggcaggacctggcctggtgcaaccgacacagaccctgtccctcacatgcactgtctctgggttctcattaa
ccagcgatggtgtacactggattcgacagcctccaggaaagggtctggaatggatgggaataatatattatgatggaggcacagatt
ataattcagcaattaaatccagactgagcatcagcagggacacctccaagagccaagttttcttaaaaatcaacagtctgcaaactgat
gacacagccatgtattactgtgccagaatccactttgattactggggccaaggagtcatggtcacagtctcctctgatctggagcccaa
atcttgtgacaaaactcacacatgcccaccgtgcccagcacctgaactcctggggggaccgtcagtcttcctcttccccccaaaaccc
aaggacaccctcatgatctcccggacccctgaggtcacatgcgtggtggtggacgtgagccacgaagaccctgaggtcaagttcaa
ctggtacgtggacggcgtggaggtgcataatgccaagacaaagccgcgggaggagcagtacaacagcacgtaccgtgtggtcag
cgtcctcaccgtcctgcaccaggactggctgaatggcaaggagtacaagtgcaaggtctccaacaaagccctcccagcccccatcg
agaaaaccatctccaaagccaaagggcagccccgagaaccacaggtgtacaccctgcccccatcccgggatgagctgaccaaga
accaggtcagcctgacctgcctggtcaaaggcttctatcccagcgacatcgccgtggagtgggagagcaatgggcagccggagaa
caactacaagaccacgcctcccgtgctggactccgacggctccttcttcctctacagcaagctcaccgtggacaagagcaggtggc
agcaggggaacgtcttctcatgctccgtgatgcatgaggctctgcacaaccactacacgcagaagagcctctccctgtctccgggta
aagcggatccttcgaacctgctcccatcctgggccattaccttaatctcagtaaatggaatttttgtgatatgctgcctgacctactgcttt
gccccaagatgcagagagagaaggaggaatgagagattgagaagggaaagtgtacgccctgtataaatcgata
AA
1D8 scFv IgG WTH WTCH2CH3-CD80(amino acid sequence)
MDFQVQIFSFLLISASVIMSRGVDIVLTQSPTTIAASPGEKVTITCRASSSVSYMYWY
QQKSGASPKLWIYDTSKLASGVPNRFSGSGSGTSYSLAINTMETEDAATYYCQQWS
STPLTFGSGTKLEIKRGGGGSGGGGSGGGGSQVQLKEAGPGLVQPTQTLSLTCTVSG
FSLTSDGVHWIRQPPGKGLEWMGIIYYDGGTDYNSAIKSRLSISRDTSKSQVFLKINS
LQTDDTAMYYCARIHFDYWGQGVMVTVSSDLEPKSCDKTHTCPPCPAPELLGGPS
VFLFPPKPKDTLMISRTPEVTCVVVDVSHEDPEVKFNWYVDGVEVHNAKTKPREEQ
YNSTYRVVSVLTVLHQDWLNGKEYKCKVSNKALPAPIEKTISKAKGQPREPQVYTL
PPSRDELTKNQVSLTCLVKGFYPSDIAVEWESNGQPENNYKTTPPVLDSDGSFFLYS
KLTVDKSRWQQGNVFSCSVMHEALHNHYTQKSLSLSPGKADPSNLLPSWAITLISV
NGIFVICCLTYCFAPRCRERRRNERLRRESVRPV
NT
Anti-human CD3 scFv WTH WTCH2CH3(nucleotide sequence)
aagcttatggattttcaagtgcagattttcagcttcctgctaatcagtgcttcagtcataatgtccagaggagtcgacatccagatgacac
agactacatcctccctgtctgcctctctgggagacagagtcaccatcagttgcagggcaagtcaggacattcgcaattatttaaactgg
tatcagcagaaaccagatggaactgttaaactcctgatctactacacatcaagattacactcaggagtcccatcaaggttcagtggcag
tgggtctggaacagattattctctcaccattgccaacctgcaaccagaagatattgccacttacttttgccaacagggtaatacgcttccg
tggacgttcggtggaggcaccaaactggtaaccaaacgggagctcggtggcggtggctcgggcggtggtgggtcgggtggcgg
cggatctatcgatgaggtccagctgcaacagtctggacctgaactggtgaagcctggagcttcaatgtcctgcaaggcctctggttac
tcattcactggctacatcgtgaactggctgaagcagagccatggaaagaaccttgagtggattggacttattaatccatacaaaggtctt
actacctacaaccagaaattcaagggcaaggccacattaactgtagacaagtcatccagcacagcctacatggagctcctcagtctg
acatctgaagactctgcagtctattactgtgcaagatctgggtactatggtgactcggactggtacttcgatgtctggggcgcagggac
cacggtcaccgtctcctctgatcaggagcccaaatcttgtgacaaaactcacacatgcccaccgtgcccagcacctgaactcctggg
gggaccgtcagtcttcctcttccccccaaaacccaaggacaccctcatgatctcccggacccctgaggtcacatgcgtggtggtgga
cgtgagccacgaagaccctgaggtcaagttcaactggtacgtggacggcgtggaggtgcataatgccaagacaaagccgcggga
ggagcagtacaacagcacgtaccgtgtggtcagcgtcctcaccgtcctgcaccaggactggctgaatggcaaggagtacaagtgc
aaggtctccaacaaagccctcccagcccccatcgagaaaacaatctccaaagccaaagggcagccccgagaaccacaggtgtac
accctgcccccatcccgggatgagctgaccaagaaccaggtcagcctgacctgcctggtcaaaggcttctatcccagcgacatcgc
cgtggagtgggagagcaatgggcagccggagaacaactacaagaccacgcctcccgtgctggactccgacggctccttcttcctct
acagcaagctcaccgtggacaagagcaggtggcagcaggggaacgtcttctcatgctccgtgatgcatgaggctctgcacaacca
ctacacgcagaagagcctctccctgtctccgggtaaatgatctaga
AA
Anti-human CD3 scFv WTH WTCH2CH3(amino acid sequence)
MDFQVQIFSFLLISASVIMSRGVDIQMTQTTSSLSASLGDRVTISCRASQDIRNYLNW
YQQKPDGTVKLLIYYTSRLHSGVPSRFSGSGSGTDYSLTIANLQPEDIATYFCQQGN
TLPWTFGGGTKLVTKRELGGGGSGGGGSGGGGSIDEVQLQQSGPELVKPGASMSC
KASGYSFTGYIVNWLKQSHGKNLEWIGLINPYKGLTTYNQKFKGKATLTVDKSSST
AYMELLSLTSEDSAVYYCARSGYYGDSDWYFDVWGAGTTVTVSSDQEPKSCDKT
HTCPPCPAPELLGGPSVFLFPPKPKDTLMISRTPEVTCVVVDVSHEDPEVKFNWYVD
GVEVHNAKTKPREEQYNSTYRVVSVLTVLHQDWLNGKEYKCKVSNKALPAPIEKT
ISKAKGQPREPQVYTLPPSRDELTKNQVSLTCLVKGFYPSDIAVEWESNGQPENNYK
TTPPVLDSDGSFFLYSKLTVDKSRWQQGNVFSCSVMHEALHNHYTQKSLSLSPGK
NT
2H7-antiCD40 scFv MTH (SSS) MTCH2WTCH3(2h7-40.2.220Ig + restriction sites)
(nucleotide sequence)
aagcttgccgccatggattttcaagtgcagattttcagcttcctgctaatcagtgcttcagtcataattgccagaggacaaattgttctctc
ccagtctccagcaatcctgtctgcatctccaggggagaaggtcacaatgacttgcagggccagctcaagtgtaagttacatgcactgg
taccagcagaagccaggatcctcccccaaaccctggatttatgccccatccaacctggcttctggagtccctgctcgcttcagtggca
gtgggtctgggacctcttactctctcacaatcagcagagtggaggctgaagatgctgccacttattactgccagcagtggagttttaac
ccacccacgttcggtgctgggaccaagctggagctgaaaggtggcggtggctcgggcggtggtggatctggaggaggtgggagc
tctcaggcttatctacagcagtctggggctgagctggtgaggcctggggcctcagtgaagatgtcctgcaaggcttctggctacacat
ttaccagttacaatatgcactgggtaaagcagacacctagacagggcctggaatggattggagctatttatccaggaaatggtgatact
tcctacaatcagaagttcaagggcaaggccacactgactgtagacaaatcctccagcacagcctacatgcagctcagcagcctgac
atctgaagactctgcggtctatttctgtgcaagagtggtgtactatagtaactcttactggtacttcgatgtctggggcacagggaccac
ggtcaccgtctcttctgatcaatccaactctgaagaagcaaagaaagaggaggccaaaaaggaggaagccaagaaatctaacagc
gtcgacattgttctgactcagtctccagccaccctgtctgtgactccaggagatagagtctctctttcctgcagggccagccagagtatt
agcgactacttacactggtatcaacaaaaatcacatgagtctccaaggcttctcatcaaatatgcttcccattccatctctgggatcccct
ccaggttcagtggcagtggatcagggtcagatttcactctcagtatcaacagtgtggaacctgaagatgttggaatttattactgtcaac
atggtcacagctttccgtggacgttcggtggaggcaccaagctggaaatcaaacggggtggcggtggctcgggcggaggtgggtc
gggtggcggcggatctcagatccagttggtgcaatctggacctgagctgaagaagcctggagagacagtcaggatctcctgcaag
gcttctgggtatgccttcacaactactggaatgcagtgggtgcaagagatgccaggaaagggtttgaagtggattggctggataaac
accccactctggagtgccaaaatatgtagaagacttcaaggacggtttgccttctctttggaaacctctgccaacactgcatatttacag
ataagcaacctcaaagatgaggacacggctacgtatttctgtgtgagatccgggaatggtaactatgacctggcctactttgcttactg
gggccaagggacactggtcactgtctctgatcaggagcccaaatcttctgacaaaactcacacatccccaccgtccccagcacctga
actcctggggggatcgtcagtcttcctcttccccccaaaacccaaggacaccctcatgatctcccggacccctgaggtcacatgcgtg
gtggtggacgtgagccacgaagaccctgaggtcaagttcaactggtacgtggacggcgtggaggtgcataatgccaagacaaagc
cgcgggaggagcagtacaacagcacgtaccgtgtggtcagcgtcctcaccgtcctgcaccaggactggctgaatggcaaggagta
caagtgcaaggtctccaacaaagccctcccagcccccatcgagaaaacaatctccaaagccaaagggcagccccgagaaccaca
ggtgtacaccctgcccccatcccgggatgagctgaccaagaaccaggtcagcctgacctgcctggtcaaaggcttctatcccagcg
acatcgccgtggagtgggagagcaatgggcagccggagaacaactacaagaccacgcctcccgtgctggactccgacggctcctt
cttcctctacagcaagctcaccgtggacaagagcaggtggcagcaggggaacgtcttctcatgctccgtgatgcatgaggctctgca
caaccactacacgcagaagagcctctccctgtctccgggtaaatgatctaga
AA
2H7-antiCD40 scFv MTH (SSS) MTCH2WTCH3(2H7-40.2.220Ig) (amino acid
sequence)
MDFQVQIFSFLLISASVIIARGQIVLSQSPAILSASPGEKVTMTCRASSSVSYMHWYQ
QKPGSSPKPWIYAPSNLASGVPARFSGSGSGTSYSLTISRVEAEDAATYYCQQWSFN
PPTFGAGTKLELKGGGGSGGGGSGGGGSSQAYLQQSGAELVRPGASVKMSCKASG
YTFTSYNMHWVKQTPRQGLEWIGAIYPGNGDTSYNQKFKGKATLTVDKSSSTAYM
QLSSLTSEDSAVYFCARVVYYSNSYWYFDVWGTGTTVTVSSDQSNSEEAKKEEAK
KEEAKKSNSVDIVLTQSPATLSVTPGDRVSLSCRASQSISDYLHWYQQKSHESPRLLI
KYASHSISGIPSRFSGSGSGSDFTLSINSVEPEDVGIYYCQHGHSFPWTFGGGTKLEIK
RGGGGSGGGGSGGGGSQIQLVQSGPELKKPGETVRISCKASGYAFTTTGMQWVQE
MPGKGLKWIGWINTPLWSAKICRRLQGRFAFSLETSANTAYLQISNLKDEDTATYF
CVRSGNGNYDLAYFAYWGQGTLVTVSDQEPKSSDKTHTSPPSPAPELLGGSSVFLF
PPKPKDTLMISRTPEVTCVVVDVSHEDPEVKFNWYVDGVEVHNAKTKPREEQYNS
TYRVVSVLTVLHQDWLNGKEYKCKVSNKALPAPIEKTISKAKGQPREPQVYTLPPS
RDELTKNQVSLTCLVKGFYPSDIAVEWESNGQPENNYKTTPPVLDSDGSFFLYSKLT
VDKSRWQQGNVFSCSVMHEALHNHYTQKSLSLSPGK
NT
5B9 VH(includes the VH leader peptide) (nucleotide sequence)
atggctgtcttggggctgctcttctgcctggtgacatttccaagctgtgtcctatcccaggtgcagctgaagcagtcaggacctggcct
agtgcagtcctcacagagcctgtccatcacctgcacagtctctggtttctcattaactacctatgctgtacactgggttcgccagtctcca
ggaaagggtctggagtggctgggagtgatatggagtggtggaatcacagactataatgcagctttcatatccagactgagcatcacc
aaggacgattccaagagccaagttttctttaaaatgaacagtctgcaacctaatgacacagccatttattactgtgccagaaatgggggt
gataactacccttattactatgctatggactactggggtcaaggaacctcagtcaccgtctcctca
NT
5B9 VH(minus the leader) (nucleotide sequence)
caggtgcagctgaagcagtcaggacctggcctagtgcagtcctcacagagcctgtccatcacctgcacagtctctggtttctcattaac
tacctatgctgtacactgggttcgccagtctccaggaaagggtctggagtggctgggagtgatatggagtggtggaatcacagactat
aatgcagctttcatatccagactgagcatcaccaaggacgattccaagagccaagttttctttaaaatgaacagtctgcaacctaatgac
acagccatttattactgtgccagaaatgggggtgataactacccttattactatgctatggactactggggtcaaggaacctcagtcacc
gtctcctca
AA
5B9 VH(includes leader peptide) (amino acid sequence)
MAVLGLLFCLVTFPSCVLSQVQLKQSGPGLVQSSQSLSITCTVSGFSLTTYAVHWVR
QSPGKGLEWLGVIWSGGITDYNAAFISRLSITKDDSKSQVFFKMNSLQPNDTAIYYC
ARNGGDNYPYYYAMDYWGQGTSVTVSS
5B9 VH(no leader peptide) (amino acid sequence)
QVQLKQSGPGLVQSSQSLSITCTVSGFSLTTYAVHWVRQSPGKGLEWLGVIWSGGI
TDYNAAFISRLSITKDDSKSQVFFKMNSLQPNDTAIYYCARNGGDNYPYYYAMDY
WGQGTSVTVSS
NT
5B9 VL(nucleotide sequence)
atgaggttctctgctcagcttctggggctgcttgtgctctggatccctggatccactgcagatattgtgatgacgcaggctgcattctcca
atccagtcactcttggaacatcagcttccatctcctgcaggtctagtaagagtctcctacatagtaatggcatcacttatttgtattggtatc
tgcagaagccaggccagtctcctcagctcctgatttatcagatgtccaaccttgcctcaggagtcccagacaggttcagtagcagtgg
gtcaggaactgatttcacactgagaatcagcagagtggaggctgaggatgtgggtgtttattactgtgctcaaaatctagaacttccgct
cacgttcggtgctgggaccaagctggagctgaaacgg
AA
5B9 VL (amino acid sequence)
MRFSAQLLGLLVLWIPGSTADIVMTQAAFSNPVTLGTSASISCRSSKSLLHSNGITYL
YWYLQKPGQSPQLLIYQMSNLASGVPDRFSSSGSGTDFTLRISRVEAEDVGVYYCA
QNLELPLTFGAGTKLELKR
NT
5B9 scFv(nucleotide sequence)
aagcttgccgccatgaggttctctgctcagcttctggggctgcttgtgctctggatccctggatccactgcagatattgtgatgacgcag
gctgcattctccaatccagtcactcttggaacatcagcttccatctcctgcaggtctagtaagagtctcctacatagtaatggcatcactta
tttgtattggtatctgcagaagccaggccagtctcctcagctcctgatttatcagatgtccaaccttgcctcaggagtcccagacaggttc
agtagcagtgggtcaggaactgatttcacactgagaatcagcagagtggaggctgaggatgtgggtgtttattactgtgctcaaaatct
agaacttccgctcacgttcggtgctgggaccaagctggagctgaaacggggtggcggtggctcgggcggtggtgggtcgggtgg
cggcggatcgtcacaggtgcagctgaagcagtcaggacctggcctagtgcagtcctcacagagcctgtccatcacctgcacagtct
ctggtttctcattaactacctatgctgtacactgggttcgccagtctccaggaaagggtctggagtggctgggagtgatatggagtggt
ggaatcacagactataatgcagctttcatatccagactgagcatcaccaaggacgattccaagagccaagttttctttaaaatgaacagt
ctgcaacctaatgacacagccatttattactgtgccagaaatgggggtgataactacccttattactatgctatggactactggggtcaa
ggaacctcagtcaccgtctcctct
AA
5B9 scFv(amino acid sequence)
MRFSAQLLGLLVLWIPGSTADIVMTQAAFSNPVTLGTSASISCRSSKSLLHSNGITYL
YWYLQKPGQSPQLLIYQMSNLASGVPDRFSSSGSGTDFTLRISRVEAEDVGVYYCA
QNLELPLTFGAGTKLELKRGGGGSGGGGSGGGGSSQVQLKQSGPGLVQSSQSLSIT
CTVSGFSLTTYAVHWVRQSPGKGLEWLGVIWSGGITDYNAAFISRLSITKDDSKSQV
FFKMNSLQPNDTAIYYCARNGGDNYPYYYAMDYWGQGTSVTVSS
NT
5B9 scFv-hmtIgG1-hCD80(nucleotide sequence)
aagcttgccgccatgaggttctctgctcagcttctggggctgcttgtgctctggatccctggatccactgcagatattgtgatgacgcag
gctgcattctccaatccagtcactcttggaacatcagcttccatctcctgcaggtctagtaagagtctcctacatagtaatggcatcactta
tttgtattggtatctgcagaagccaggccagtctcctcagctcctgatttatcagatgtccaaccttgcctcaggagtcccagacaggttc
agtagcagtgggtcaggaactgatttcacactgagaatcagcagagtggaggctgaggatgtgggtgtttattactgtgctcaaaatct
agaacttccgctcacgttcggtgctgggaccaagctggagctgaaacggggtggcggtggctcgggcggtggtgggtcgggtgg
cggcggatcgtcacaggtgcagctgaagcagtcaggacctggcctagtgcagtcctcacagagcctgtccatcacctgcacagtct
ctggtttctcattaactacctatgctgtacactgggttcgccagtctccaggaaagggtctggagtggctgggagtgatatggagtggt
ggaatcacagactataatgcagctttcatatccagactgagcatcaccaaggacgattccaagagccaagttttctttaaaatgaacagt
ctgcaacctaatgacacagccatttattactgtgccagaaatgggggtgataactacccttattactatgctatggactactggggtcaa
ggaacctcagtcaccgtctcctctgatctggagcccaaatcttctgacaaaactcacacaagcccaccgagcccagcacctgaactc
ctggggggatcgtcagtcttcctcttccccccaaaacccaaggacaccctcatgatctcccggacccctgaggtcacatgcgtggtg
gtggacgtgagccacgaagaccctgaggtcaagttcaactggtacgtggacggcgtggaggtgcataatgccaagacaaagccgc
gggaggagcagtacaacagcacgtaccgtgtggtcagcgtcctcaccgtcctgcaccaggactggctgaatggcaaggagtacaa
gtgcaaggtctccaacaaagccctcccagcccccatcgagaaaaccatctccaaagccaaagggcagccccgagaaccacaggt
gtacaccctgcccccatcccgggatgagctgaccaagaaccaggtcagcctgacctgcctggtcaaaggcttctatcccagcgaca
tcgccgtggagtgggagagcaatgggcagccggagaacaactacaagaccacgcctcccgtgctggactccgacggctccttctt
cctctacagcaagctcaccgtggacaagagcaggtggcagcaggggaacgtcttctcatgctccgtgatgcatgaggctctgcaca
accactacacgcagaagagcctctccctgtctccgggtaaagcggatccttcgaacctgctcccatcctgggccattaccttaatctca
gtaaatggaatttttgtgatatgctgcctgacctactgctttgccccaagatgcagagagagaaggaggaatgagagattgagaaggg
aaagtgtacgccctgtataaatcgatactcgag
AA
5B9 scFv-hmtIgG1-hCD80(amino acid sequence)
MRFSAQLLGLLVLWIPGSTADIVMTQAAFSNPVTLGTSASISCRSSKSLLHSNGITYL
YWYLQKPGQSPQLLIYQMSNLASGVPDRFSSSGSGTDFTLRISRVEAEDVGVYYCA
QNLELPLTFGAGTKLELKRGGGGSGGGGSGGGGSSQVQLKQSGPGLVQSSQSLSIT
CTVSGFSLTTYAVHWVRQSPGKGLEWLGVIWSGGITDYNAAFISRLSITKDDSKSQV
FFKMNSLQPNDTAIYYCARNGGDNYPYYYAMDYWGQGTSVTVSSDLEPKSSDKTH
TSPPSPAPELLGGSSVFLFPPKPKDTLMISRTPEVTCVVVDVSHEDPEVKFNWYVDG
VEVHNAKTKPREEQYNSTYRVVSVLTVLHQDWLNGKEYKCKVSNKALPAPIEKTIS
KAKGQPREPQVYTLPPSRDELTKNQVSLTCLVKGFYPSDIAVEWESNGQPENNYKT
TPPVLDSDGSFFLYSKLTVDKSRWQQGNVFSCSVMHEALHNHYTQKSLSLSPGKAD
PSNLLPSWAITLISVNGIFVICCLTYCFAPRCRERRRNERLRRESVRPV
NT
2e12 scFv WTH CH2 CH3(2e12 scFv-WthIgG-CD80) (nucleotide sequence)
aagcttatggattttcaagtgcagattttcagcttcctgctaatcagtgcttcagtcataatgtccagaggagtcgacattgtgctcaccca
atctccagcttctttggctgtgtctctaggtcagagagccaccatctcctgcagagccagtgaaagtgttgaatattatgtcacaagttta
atgcagtggtaccaacagaaaccaggacagccacccaaactcctcatctctgctgcatccaacgtagaatctggggtccctgccagg
tttagtggcagtgggtctgggacagacttcagcctcaacatccatcctgtggaggaggatgatattgcaatgtatttctgtcagcaaagt
aggaaggttccttggacgttcggtggaggcaccaagctggaaatcaaacggggtggcggtggctcgggcggaggtgggtcgggt
ggcggcggatctcaggtgcagctgaaggagtcaggacctggcctggtggcgccctcacagagcctgtccatcacatgcaccgtct
cagggttctcattaaccggctatggtgtaaactgggttcgccagcctccaggaaagggtctggagtggctgggaatgatatggggtg
atggaagcacagactataattcagctctcaaatccagactgagcatcaccaaggacaactCcaagagccaagttttcttaaaaatgaa

[0856] cagtctgcaaactgatgacacagccagatactactgtgccagagatggttatagtaactttcattactatgttatggactactggggtcaa
ggaacctcagtcaccgtctcctcagatctggagcccaaatcttgtgacaaaactcacacatgcccaccgtgcccagcacctgaactc
ctggggggaccgtcagtcttcctcttccccccaaaacccaaggacaccctcatgatctcccggacccctgaggtcacatgcgtggtg
gtggacgtgagccacgaagaccctgaggtcaagttcaactggtacgtggacggcgtggaggtgcataatgccaagacaaagccgc
gggaggagcagtacaacagcacgtaccgtgtggtcagcgtcctcaccgtcctgcaccaggactggctgaatggcaaggagtacaa
gtgcaaggtctccaacaaagccctcccagcccccatcgagaaaaccatctccaaagccaaagggcagccccgagaaccacaggt
gtacaccctgcccccatcccgggatgagctgaccaagaaccaggtcagcctgacctgcctggtcaaaggcttctatcccagcgaca
tcgccgtggagtgggagagcaatgggcagccggagaacaactacaagaccacgcctcccgtgctggactccgacggctccttctt
cctctacagcaagctcaccgtggacaagagcaggtggcagcaggggaacgtcttctcatgctccgtgatgcatgaggctctgcaca
accactacacgcagaagagcctctccctgtctccgggtaaagcggatccttcgaacctgctcccatcctgggccattaccttaatctca
gtaaatggaatttttgtgatatgctgcctgacctactgctttgccccaagatgcagagagagaaggaggaatgagagattgagaaggg
aaagtgtacgccctgtataaatcgat
AA
2e12 scFv WTH CH2 CH3 (2e12 scFv-WthIgG-CD80) (amino acid sequence)
MDFQVQIFSFLLISASVIMSRGVDIVLTQSPASLAVSLGQRATISCRASESVEYYVTSL
MQWYQQKPGQPPKLLISAASNVESGVPARFSGSGSGTDFSLNIHPVEEDDIAMYFCQ
QSRKVPWTFGGGTKLEIKRGGGGSGGGGSGGGGSQVQLKESGPGLVAPSQSLSITC
TVSGFSLTGYGVNWVRQPPGKGLEWLGMIWGDGSTDYNSALKSRLSITKDNSKSQ
VFLKMNSLQTDDTARYYCARDGYSNFHYYVMDYWGQGTSVTVSSDLEPKSCDKT
HTCPPCPAPELLGGPSVFLFPPKPKDTLMISRTPEVTCVVVDVSHEDPEVKFNWYVD
GVEVHNAKTKPREEQYNSTYRVVSVLTVLHQDWLNGKEYKCKVSNKALPAPIEKT
ISKAKGQPREPQVYTLPPSRDELTKNQVSLTCLVKGFYPSDIAVEWESNGQPENNYK
TTPPVLDSDGSFFLYSKLTVDKSRWQQGNVFSCSVMHEALHNHYTQKSLSLSPGKA
DPSNLLPSWAITLISVNGIFVICCLTYCFAPRCRERRRNERLRRESVRPV
NT
2H7-human IgE Fc (CH2—CH3—CH4) (nucleotide sequence)
aagcttgccgccatggatcaagtgcagattttcagcttcctgctaatcagtgcttcagtcataattgccagaggacaaattgttctctc
ccagtctccagcaatcctgtctgcatctccaggggagaaggtcacaatgacttgcagggccagctcaagtgtaagttacatgcactgg
taccagcagaagccaggatcctcccccaaaccctggatttatgccccatccaacctggcttctggagtccctgctcgcttcagtggca
gtgggtctgggacctcttactctctcacaatcagcagagtggaggctgaagatgctgccacttattactgccagcagtggagttttaac
ccacccacgttcggtgctgggaccaagctggagctgaaaggtggcggtggctcgggcggtggtggatctggaggaggtgggagc
tctcaggcttatctacagcagtctggggctgagctggtgaggcctggggcctcagtgaagatgtcctgcaaggcttctggctacacat
ttaccagttacaatatgcactgggtaaagcagacacctagacagggcctggaatggattggagctatttatccaggaaatggtgatact
tcctacaatcagaagttcaagggcaaggccacactgactgtagacaaatcctccagcacagcctacatgcagctcagcagcctgac
atctgaagactctgcggtctatttctgtgcaagagtggtgtactatagtaactcttactggtacttcgatgtctggggcacagggaccac
ggtcaccgtctctgatcacgtctgctccagggacttcaccccgcccaccgtgaagatcttacagtcgtcctgcgacggcggcgggca
cttccccccgaccatccagctcctgtgcctcgtctctgggtacaccccagggactatcaacatcacctggctggaggacgggcaggt
catggacgtggacttgtccaccgcctctaccacgcaggagggtgagctggcctccacacaaagcgagctcaccctcagccagaag
cactggctgtcagaccgcacctacacctgccaggtcacctatcaaggtcacacctttgaggacagcaccaagaagtgtgcagattcc
aacccgagaggggtgagcgcctacctaagccggcccagcccgttcgacctgttcatccgcaagtcgcccacgatcacctgtctggt
ggtggacctggcacccagcaaggggaccgtgaacctgacctggtcccgggccagtgggaagcctgtgaaccactccaccagaaa
ggaggagaagcagcgcaatggcacgttaaccgtcacgtccaccctgccggtgggcacccgagactggatcgagggggagacct
accagtgcagggtgacccacccccacctgcccagggccctcatgcggtccacgaccaagaccagcggcccgcgtgctgccccg
gaagtctatgcgtttgcgacgccggagtggccggggagccgggacaagcgcaccctcgcctgcctgatccagaacttcatgcctg
aggacatctcggtgcagtggctgcacaacgaggtgcagctcccggacgcccggcacagcacgacgcagccccgcaagaccaag
ggctccggcttcttcgtcttcagccgcctggaggtgaccagggccgaatgggagcagaaagatgagttcatctgccgtgcagtccat
gaggcagcgagcccctcacagaccgtccagcgagcggtgtctgtaaatcccggtaaatgataatctaga
AA
2H7 scFv IgE (CH2—CH3—CH4) (amino acid sequence)
MDFQVQIFSFLLISASVIIARGQIVLSQSPAILSASPGEKVTMTCRASSSVSYMHWYQ
QKPGSSPKPWIYAPSNLASGVPARFSGSGSGTSYSLTISRVEAEDAATYYCQQWSFN
PPTFGAGTKLELKGGGGSGGGGSGGGGSSQAYLQQSGAELVRPGASVKMSCKASG
YTFTSYNMHWVKQTPRQGLEWIGAIYPGNGDTSYNQKFKGKATLTVDKSSSTAYM
QLSSLTSEDSAVYFCARVVYYSNSYWYFDVWGTGTTVTVSDHVCSRDFTPPTVKIL
QSSCDGGGHFPPTIQLLCLVSGYTPGTINITWLEDGQVMDVDLSTASTTQEGELAST
QSELTLSQKHWLSDRTYTCQVTYQGHTFEDSTKKCADSNPRGVSAYLSRPSPFDLFI
RKSPTITCLVVDLAPSKGTVNLTWSRASGKPVNHSTRKEEKQRNGTLTVTSTLPVGT
RDWIEGETYQCRVTHPHLPRALMRSTTKTSGPRAAPEVYAFATPEWPGSRDKRTLA
CLIQNFMPEDISVQWLHINEVQLPDARHSTTQPRKTKGSGFFVFSRLEVTRAEWEQK
DEFICRAVHEAASPSQTVQRAVSVNPGK
NT
2H7 scFv MH (SSS) MCH2WTCH3 (nucleotide sequence)
aagcttgccgccatggattttcaagtgcagattttcagcttcctgctaatcagtgcttcagtcataattgccagaggacaaattgttctctc
ccagtctccagcaatcctgtctgcatctccaggggagaaggtcacaatgacttgcagggccagctcaagtgtaagttacatgcactgg
taccagcagaagccaggatcctcccccaaaccctggatttatgccccatccaacctggcttctggagtccctgctcgcttcagtggca
gtgggtctgggacctcttactctctcacaatcagcagagtggaggctgaagatgctgccacttattactgccagcagtggagttttaac
ccacccacgttcggtgctgggaccaagctggagctgaaagatggcggtggctcgggcggtggtggatctggaggaggtgggagc
tctcaggcttatctacagcagtctggggctgagctggtgaggcctggggcctcagtgaagatgtcctgcaaggcttctggctacacat
ttaccagttacaatatgcactgggtaaagcagacacctagacagggcctggaatggattggagctatttatccaggaaatggtgatact
tcctacaatcagaagttcaagggcaaggccacactgactgtagacaaatcctccagcacagcctacatgcagctcagcagcctgac
atctgaagactctgcggtctatttctgtgcaagagtggtgtactatagtaactcttactggtacttcgatgtctggggcacagggaccac
ggtcaccgtctcttctgatcaggagcccaaatcttctgacaaaactcacacatccccaccgtccccagcacctgaactcctgggggga
tcgtcagtcttcctcttccccccaaaacccaaggacaccctcatgatctcccggacccctgaggtcacatgcgtggtggtggacgtga
gccacgaagaccctgaggtcaagttcaactggtacgtggacggcgtggaggtgcataatgccaagacaaagccgcgggaggagc
agtacaacagcacgtaccgtgtggtcagcgtcctcaccgtcctgcaccaggactggctgaatggcaaggagtacaagtgcaaggtc
tccaacaaagccctcccagcccccatcgagaaaacaatctccaaagccaaagggcagccccgagaaccacaggtgtacaccctg
cccccatcccgggatgagctgaccaagaaccaggtcagcctgacctgcctggtcaaaggcttctatcccagcgacatcgccgtgga
gtgggagagcaatgggcagccggagaacaactacaagaccacgcctcccgtgctggactccgacggctccttcttcctctacagca
agctcaccgtggacaagagcaggtggcagcaggggaacgtcttctcatgctccgtgatgcatgaggctctgcacaaccactacacg
cagaagagcctctccctgtctccgggtaaatgatctaga
AA
2H7 scFv MH (SSS) MCH2WTCH3 (amino acid sequence)
MDFQVQIFSFLLISASVIIARGQIVLSQSPAILSASPGEKVTMTCRASSSVSYMHWYQ
QKPGSSPKPWIYAPSNLASGVPARFSGSGSGTSYSLTISRVEAEDAATYYCQQWSFN
PPTFGAGTKLELKDGGGSGGGGSGGGGSSQAYLQQSGAELVRPGASVKMSCKASG
YTFTSYNMHWVKQTPRQGLEWIGAIYPGNGDTSYNQKFKGKATLTVDKSSSTAYM
QLSSLTSEDSAVYFCARVVYYSNSYWYFDVWGTGTTVTVSSDQEPKSSDKTHTSPP
SPAPELLGGSSVFLFPPKPKDTLMISRTPEVTCVVVDVSHEDPEVKFNWYVDGVEV
HNAKTKPREEQYNSTYRVVSVLTVLHQDWLNGKEYKCKVSNKALPAPIEKTISKA
KGQPREPQVYTLPPSRDELTKNQVSLTCLVKGFYPSDIAVEWESNGQPENNYKTTPP
VLDSDGSFFLYSKLTVDKSRWQQGNVFSCSVMHEALHNHYTQKSLSLSPGK
NT
5B9 scFv MTHWTCH2CH3 (nucleotide sequence)
aagcttgccgccatgaggttctctgctcagcttctggggctgcttgtgctctggatccctggatccactgcagatattgtgatgacgcag
gctgcattctccaatccagtcactcttggaacatcagcttccatctcctgcaggtctagtaagagtctcctacatagtaatggcatcactta
tttgtattggtatctgcagaagccaggccagtctcctcagctcctgatttatcagatgtccaaccttgcctcaggagtcccagacaggttc
agtagcagtgggtcaggaactgatttcacactgagaatcagcagagtggaggctgaggatgtgggtgtttattactgtgctcaaaatct
agaacttccgctcacgttcggtgctgggaccaagctggagctgaaacggggtggcggtggctcgggcggtggtgggtcgggtgg
cggcggatcgtcacaggtgcagctgaagcagtcaggacctggcctagtgcagtcctcacagagcctgtccatcacctgcacagtct
ctggtttctcattaactacctatgctgtacactgggttcgccagtctccaggaaagggtctggagtggctgggagtgatatggagtggt
ggaatcacagactataatgcagctttcatatccagactgagcatcaccaaggacgattccaagagccaagttttctttaaaatgaacagt
ctgcaacctaatgacacagccatttattactgtgccagaaatgggggtgataactacccttattactatgctatggactactggggtcaa
ggaacctcagtcaccgtctcctctgatcaggagcccaaatcttctgacaaaactcacacatccccaccgtccccagcacctgaactcc
tggggggaccgtcagtcttcctcttccccccaaaacccaaggacaccctcatgatctcccggacccctgaggtcacatgcgtggtgg
tggacgtgagccacgaagaccctgaggtcaagttcaactggtacgtggacggcgtggaggtgcataatgccaagacaaagccgcg
ggaggagcagtacaacagcacgtaccgtgtggtcagcgtcctcaccgtcctgcaccaggactggctgaatggcaaggagtacaag
tgcaaggtctccaacaaagccctcccagcccccatcgagaaaacaatctccaaagccaaagggcagccccgagaaccacaggtgt
acaccctgcccccatcccgggatgagctgaccaagaaccaggtcagcctgacctgcctggtcaaaggcttctatcccagcgacatc
gccgtggagtgggagagcaatgggcagccggagaacaactacaagaccacgcctcccgtgctggactccgacggctccttcttcc
tctacagcaagctcaccgtggacaagagcaggtggcagcaggggaacgtcttctcatgctccgtgatgcatgaggctctgcacaac
cactacacgcagaagagcctctccctgtctccgggtaaatgatctaga
5B9 scFv MTHWTCH2CH3 (amino acid sequence)
MRFSAQLLGLLVLWIPGSTADIVMTQAAFSNPVTLGTSASISCRSSKSLLHSNGITYL
YWYLQKPGQSPQLLIYQMSNLASGVPDRFSSSGSGTDFTLRISRVEAEDVGVYYCA
QNLELPLTFGAGTKLELKRGGGGSGGGGSGGGGSSQVQLKQSGPGLVQSSQSLSIT
CTVSGFSLTTYAVHWVRQSPGKGLEWLGVIWSGGITDYNAAFISRLSITKDDSKSQV
FFKMNSLQPNDTAIYYCARNGGDNYPYYYAMDYWGQGTSVTVSSDQEPKSSDKT
HTSPPSPAPELLGGPSVFLFPPKPKDTLMISRTPEVTCVVVDVSHEDPEVKFNWYVD
GVEVHNAKTKPREEQYNSTYRVVSVLTVLHQDWLNGKEYKCKVSNKALPAPIEKT
ISKAKGQPREPQVYTLPPSRDELTKNQVSLTCLVKGFYPSDIAVEWESNGQPENNYK
TTPPVLDSDGSFFLYSKLTVDKSRWQQGNVFSCSVMHEALHNHYTQKSLSLSPGK
Human IgG1 hinge mutations
NT
2H7 scFv- MTH (CSS) WTCH2CH3 (nucleotide sequence)
Nucleotide:
aagcttgccgccatggattttcaagtgcagattttcagcttcctgctaatcagtgcttcagtcataattgccagaggacaaattgttctctc
ccagtctccagcaatcctgtctgcatctccaggggagaaggtcacaatgacttgcagggccagctcaagtgtaagttacatgcactgg
taccagcagaagccaggatcctcccccaaaccctggatttatgccccatccaacctggcttctggagtccctgctcgcttcagtggca
gtgggtctgggacctcttactctctcacaatcagcagagtggaggctgaagatgctgccacttattactgccagcagtggagttttaac
ccacccacgttcggtgctgggaccaagctggagctgaaagatggcggtggctcgggcggtggtggatctggaggaggtgggagc
tctcaggcttatctacagcagtctggggctgagctggtgaggcctggggcctcagtgaagatgtcctgcaaggcttctggctacacat
ttaccagttacaatatgcactgggtaaagcagacacctagacagggcctggaatggattggagctatttatccaggaaatggtgatact
tcctacaatcagaagttcaagggcaaggccacactgactgtagacaaatcctccagcacagcctacatgcagctcagcagcctgac
atctgaagactctgcggtctatttctgtgcaagagtggtgtactatagtaactcttactggtacttcgatgtctggggcacagggaccac
ggtcaccgtctcttctgatcaggagcccaaatcttgtgacaaaactcacacatccccaccgtccccagcacctgaactcctgggggg
accgtcagtcttcctcttccccccaaaacccaaggacaccctcatgatctcccggacccctgaggtcacatgcgtggtggtggacgtg
agccacgaagaccctgaggtcaagttcaactggtacgtggacggcgtggaggtgcataatgccaagacaaagccgcgggaggag
cagtacaacagcacgtaccgtgtggtcagcgtcctcaccgtcctgcaccaggactggctgaatggcaaggagtacaagtgcaaggt
ctccaacaaagccctcccagcccccatcgagaaaacaatctccaaagccaaagggcagccccgagaaccacaggtgtacaccct
gcccccatcccgggatgagctgaccaagaaccaggtcagcctgacctgcctggtcaaaggcttctatcccagcgacatcgccgtgg
agtgggagagcaatgggcagccggagaacaactacaagaccacgcctcccgtgctggactccgacggctccttcttcctctacagc
aagctcaccgtggacaagagcaggtggcagcaggggaacgtcttctcatgctccgtgatgcatgaggctctgcacaaccactacac
gcagaagagcctctccctgtctccgggtaaatgatctaga
AA
2H7 scFv- MTH (CSS) WTCH2CH3 (amino acid sequence):
MDFQVQIFSFLLISASVIIARGQIVLSQSPAILSASPGEKVTMTCRASSSVSYMHWYQ
QKPGSSPKPWIYAPSNLASGVPARFSGSGSGTSYSLTISRVEAEDAATYYCQQWSFN
PPTFGAGTKLELKDGGGSGGGGSGGGGSSQAYLQQSGAELVRPGASVKMSCKASG
YTFTSYNMHWVKQTPRQGLEWIGAIYPGNGDTSYNQKFKGKATLTVDKSSSTAYM
QLSSLTSEDSAVYFCARVVYYSNSYWYFDVWGTGTTVTVSSDQEPKSCDKTHTSPP
SPAPELLGGPSVFLFPPKPKDTLMISRTPEVTCVVVDVSHEDPEVKFNWYVDGVEV
HNAKTKPREEQYNSTYRVVSVLTVLHQDWLNGKEYKCKVSNKALPAPIEKTISKA
KGQPREPQVYTLPPSRDELTKNQVSLTCLVKGFYPSDIAVEWESNGQPENNYKTTPP
VLDSDGSFFLYSKLTVDKSRWQQGNVFSCSVMHEALHNHYTQKSLSLSPGK
NT
2H7 scFv- MTH (SCS) WTCH2CH3 (nucleotide sequence)
aagcttgccgccatggattttcaagtgcagattttcagcttcctgctaatcagtgcttcagtcataattgccagaggacaaattgttctctc
ccagtctccagcaatcctgtctgcatctccaggggagaaggtcacaatgacttgcagggccagctcaagtgtaagttacatgcactgg
taccagcagaagccaggatcctcccccaaaccctggatttatgccccatccaacctggcttctggagtccctgctcgcttcagtggca
gtgggtctgggacctcttactctctcacaatcagcagagtggaggctgaagatgctgccacttattactgccagcagtggagttttaac
ccacccacgttcggtgctgggaccaagctggagctgaaagatggcggtggctcgggcggtggtggatctggaggaggtgggagc
tctcaggcttatctacagcagtctggggctgagctggtgaggcctggggcctcagtgaagatgtcctgcaaggcttctggctacacat
ttaccagttacaatatgcactgggtaaagcagacacctagacagggcctggaatggattggagctatttatccaggaaatggtgatact
tcctacaatcagaagttcaagggcaaggccacactgactgtagacaaatcctccagcacagcctacatgcagctcagcagcctgac
atctgaagactctgcggtctatttctgtgcaagagtggtgtactatagtaactcttactggtacttcgatgtctggggcacagggaccac
ggtcaccgtctcttctgatcaggagcccaaatcttctgacaaaactcacacatgcccaccgtccccagcacctgaactcctgggggg
accgtcagtcttcctcttccccccaaaacccaaggacaccctcatgatctcccggacccctgaggtcacatgcgtggtggtggacgtg
agccacgaagaccctgaggtcaagttcaactggtacgtggacggcgtggaggtgcataatgccaagacaaagccgcgggaggag
cagtacaacagcacgtaccggtggtcagcgtcctcaccgtcctgcaccaggactggctgaatggcaaggagtacaagtgcaaggt
ctccaacaaagccctcccagcccccatcgagaaaacaatctccaaagccaaagggcagccccgagaaccacaggtgtacaccct
gcccccatcccgggatgagctgaccaagaaccaggtcagcctgacctgcctggtcaaaggcttctatcccagcgacatcgccgtgg
agtgggagagcaatgggcagccggagaacaactacaagaccacgcctcccgtgctggactccgacggctccttcttcctctacagc
aagctcaccgtggacaagagcaggtggcagcaggggaacgtcttctcatgctccgtgatgcatgaggctctgcacaaccactacac
gcagaagagcctctccctgtctccgggtaaatgatctaga
AA
2H7 scFv- MTH (SCS) WTCH2CH3 (amino acid sequence)
MDFQVQIFSFLLISASVIIARGQIVLSQSPAILSASPGEKVTMTCRASSSVSYMHWYQ
QKPGSSPKPWIYAPSNLASGVPARFSGSGSGTSYSLTISRVEAEDAATYYCQQWSFN
PPTFGAGTKLELKDGGGSGGGGSGGGGSSQAYLQQSGAELVRPGASVKMSCKASG
YTFTSYNMHWVKQTPRQGLEWIGAIYPGNGDTSYNQKFKGKATLTVDKSSSTAYM
QLSSLTSEDSAVYFCARVVYYSNSYWYFDVWGTGTTVTVSSDQEPKSSDKTHTCPP
SPAPELLGGPSVFLFPPKPKDTLMISRTPEVTCVVVDVSHEDPEVKFNWYVDGVEV
HNAKTKPREEQYNSTYRVVSVLTVLHQDWLNGKEYKCKVSNKALPAPIEKTISKA
KGQPREPQVYTLPPSRDELTKNQVSLTCLVKGFYPSDIAVEWESNGQPENNYKTTPP
VLDSDGSFFLYSKLTVDKSRWQQGNVFSCSVMHEALHNHYTQKSLSLSPGK
NT
2H7 scFv- MTH (SSC) WTCH2CH3 (nucleotide sequence)
aagcttgccgccatggattttcaagtgcagattttcagcttcctgctaatcagtgcttcagtcataattgccagaggacaaattgttctctc
ccagtctccagcaatcctgtctgcatctccaggggagaaggtcacaatgacttgcagggccagctcaagtgtaagttacatgcactgg
taccagcagaagccaggatcctcccccaaaccctggatttatgccccatccaacctggcttctggagtccctgctcgcttcagtggca
gtgggtctgggacctcttactctctcacaatcagcagagtggaggctgaagatgctgccacttattactgccagcagtggagttttaac
ccacccacgttcggtgctgggaccaagctggagctgaaagatggcggtggctcgggcggtggtggatctggaggaggtgggagc
tctcaggcttatctacagcagtctggggctgagctggtgaggcctggggcctcagtgaagatgtcctgcaaggcttctggctacacat
ttaccagttacaatatgcactgggtaaagcagacacctagacagggcctggaatggattggagctatttatccaggaaatggtgatact
tcctacaatcagaagttcaagggcaaggccacactgactgtagacaaatcctccagcacagcctacatgcagctcagcagcctgac
atctgaagactctgcggtctatttctgtgcaagagtggtgtactatagtaactcttactggtacttcgatgtctggggcacagggaccac
ggtcaccgtctcttctgatcaggagcccaaatcttctgacaaaactcacacatccccaccgtgcccagcacctgaactcctgggggg
accgtcagtcttcctcttccccccaaaacccaaggacaccctcatgatctcccggacccctgaggtcacatgcgtggtggtggacgtg
agccacgaagaccctgaggtcaagttcaactggtacgtggacggcgtggaggtgcataatgccaagacaaagccgcgggaggag
cagtacaacagcacgtaccgtgtggcagcgtcctcaccgtcctgcaccaggactggctgaatggcaaggagtacaagtgcaaggt
ctccaacaaagccctcccagcccccatcgagaaaacaatctccaaagccaaagggcagccccgagaaccacaggtgtacaccct
gcccccatcccgggatgagctgaccaagaaccaggtcagcctgacctgcctggtcaaaggcttctatcccagcgacatcgccgtgg
agtgggagagcaatgggcagccggagaacaactacaagaccacgcctcccgtgctggactccgacggctccttcttcctctacagc
aagctcaccgtggacaagagcaggtggcagcaggggaacgtcttctcatgctccgtgatgcatgaggctctgcacaaccactacac
gcagaagagcctctccctgtctccgggtaaatgatctaga
AA
2H7 scFv- MTH (SSC) WTCH2CH3 (amino acid sequence)
MDFQVQIFSFLLISASVIIARGQIVLSQSPAILSASPGEKVTMTCRASSSVSYMHWYQ
QKPGSSPKPWIYAPSNLASGVPARFSGSGSGTSYSLTISRVEAEDAATYYCQQWSFN
PPTFGAGTKLELKDGGGSGGGGSGGGGSSQAYLQQSGAELVRPGASVKMSCKASG
YTFTSYNMHWVKQTPRQGLEWIGAIYPGNGDTSYNQKFKGKATLTVDKSSSTAYM
QLSSLTSEDSAVYFCARVVYYSNSYWXTDVWGTGTTVTVSSDQEPKSSDKTHTSPP
CPAPELLGGPSVFLFPPKPKDTLMISRTPEVTCVVVDVSHEDPEVKFNWYVDGVEV
HNAKTKPREEQYNSTYRVVSVLTVLHQDWLNGKEYKCKVSNKALPAPIEKTISKA
KGQPREPQVYTLPPSRDELTKNQVSLTCLVKGFYPSDIAVEWESNGQPENNYKTTPP
VLDSDGSFFLYSKLTVDKSRWQQGNVFSCSVMHEALHNHYTQKSLSLSPGK
NT
HIgGMHcys1 (nucleotide sequence)
gtt gtt gat cag gag ccc aaa tct tct gac aaa act cac aca tg
NT
HIgGMHcys2 (nucleotide sequence)
gtt gtt gat cag gag ccc aaa tct tgt gac aaa act cac aca tct cca ccg tgc
NT
HIgGMHcys3 (nucleotide sequence)
gtt gtt gat cag gag ccc aaa tct tgt gac aaa act cac aca tgt cca ccg tcc cca gca cct
NT
HuIgG1 MTCH3Y405 (nucleotide sequence)
gggcagccccgagaaccacaggtgtacaccctgcccccatcccgggaggagatgaccaagaaccaggtcagcctgacctgcctg
gtcaaaggcttctatcccagcgacatcgccgtggagtgggagagcaatgggcagccggagaacaactacaagaccacgcctccc
gtgctggactccgacggctccttctacctctatagcaagctcaccgtggacaagagcaggtggcagcaggggaacgtcttctcatgc
tccgtgatgcatgaggctctgcacaaccactacacgcagaagagcctctccctgtccccgggtaaatga
AA
HuIgG1 MTCH3Y405 (amino acid sequence)
GQPREPQVYTLPPSREEMTKNQVSLTCLVKGFYPSDIAVEWESNGQPENNYKTTPP
VLDSDGSFYLYSKLTVDKSRWQQGNVFSCSVMHEALHNHYTQKSLSLSPGK
NT
HuIgG1 MTCH3A405 (nucleotide sequence)
gggcagccccgagaaccacaggtgtacaccctgcccccatcccgggaggagatgaccaagaaccaggtcagcctgacctgcctg
gtcaaaggcttctatcccagcgacatcgccgtggagtgggagagcaatgggcagccggagaacaactacaagaccacgcctccc
gtgctggactccgacggctccttcgccctctatagcaagctcaccgtggacaagagcaggtggcagcaggggaacgtcttctcatg
ctccgtgatgcatgaggctctgcacaaccactacacgcagaagagcctctccctgtccccgggtaaatga
AA
HuIgG1 MTCH3A405 (amino acid sequence)
GQPREPQVYTLPPSREEMTKNQVSLTCLVKGFYPSDIAVEWESNGQPENNYKTTPP
VLDSDGSFALYSKLTVDKSRWQQGNVFSCSVMHEALHNHYTQKSLSLSPGK
NT
HuIgG1 MTCH3A407 (nucleotide sequence)
Gggcagccccgagaaccacaggtgtacaccctgcccccatcccgggaggagatgaccaagaaccaggtcagcctgacctgcct
ggtcaaaggcttctatcccagcgacatcgccgtggagtgggagagcaatgggcagccggagaacaactacaagaccacgcctcc
cgtgctggactccgacggctccttcttcctcgccagcaagctcaccgtggacaagagcaggtggcagcaggggaacgtcttctcat
gctccgtgatgcatgaggctctgcacaaccactacacgcagaagagcctctccctgtccccgggtaaatga
AA
HuIgG1 MTCH3A407 (amino acid sequence)
GQPREPQVYTLPPSREEMTKNQVSLTCLVKGFYPSDIAVEWESNGQPENNYKTTPP
VLDSDGSFFLASKLTVDKSRWQQGNVFSCSVMHEALHNHYTQKSLSLSPGK
NT
HuIgG1 MTCH3Y405A407 (nucleotide sequence)
gggcagccccgagaaccacaggtgtacaccctgcccccatcccgggaggagatgaccaagaaccaggtcagcctgacctgcctg
gtcaaaggcttctatcccagcgacatcgccgtggagtgggagagcaatgggcagccggagaacaactacaagaccacgcctccc
gtgctggactccgacggctccttctacctcgccagcaagctcaccgtggacaagagcaggtggcagcaggggaacgtcttctcatg
ctccgtgatgcatgaggctctgcacaaccactacacgcagaagagcctctccctgtccccgggtaaatga
AA
HuIgG1 MTCH3Y405A407 (amino acid sequence)
GQPREPQVYTLPPSREEMTKNQVSLTCLVKGFYPSDIAVEWESNGQPENNYKTTPP
VLDSDGSFYLASKLTVDKSRWQQGNVFSCSVMHEALHNHYTQKSLSLSPGK
NT
HuIgG1 MTCH3A405A407 (nucleotide sequence)
gggcagccccgagaaccacaggtgtacaccctgcccccatcccgggaggagatgaccaagaaccaggtcagcctgacctgcctg
gtcaaaggcttctatcccagcgacatcgccgtggagtgggagagcaatgggcagccggagaacaactacaagaccacgcctccc
gtgctggactccgacggctccttcgccctcgccagcaagctcaccgtggacaagagcaggtggcagcaggggaacgtcttctcatg
ctccgtgatgcatgaggctctgcacaaccactacacgcagaagagcctctccctgtccccgggtaaatga
AA
HuIgG1 MTCH3A405A407 (amino acid sequence)
GQPREPQVYTLPPSREEMTKNQVSLTCLVKGFYPSDIAVEWESNGQPENNYKTTPP
VLDSDGSFALASKLTVDKSRWQQGNVFSCSVMHEALHNHYTQKSLSLSPGK
NT
2H7 scFv MTH (SSS) WTCH2MTCH3Y405 (nucleotide sequence)
aagcttgccgccatggattttcaagtgcagattttcagcttcctgctaatcagtgcttcagtcataattgccagaggacaaattgttctctc
ccagtctccagcaatcctgtctgcatctccaggggagaaggtcacaatgacttgcagggccagctcaagtgtaagttacatgcactgg
taccagcagaagccaggatcctcccccaaaccctggatttatgccccatccaacctggcttctggagtccctgctcgcttcagtggca
gtgggtctgggacctcttactctctcacaatcagcagagtggaggctgaagatgctgccacttattactgccagcagtggagttttaac
ccacccacgttcggtgctgggaccaagctggagctgaaagatggcggtggctcgggcggtggtggatctggaggaggtgggagc
tctcaggcttatctacagcagtctggggctgagctggtgaggcctggggcctcagtgaagatgtcctgcaaggcttctggctacacat
ttaccagttacaatatgcactgggtaaagcagacacctagacagggcctggaatggattggagctatttatccaggaaatggtgatact
tcctacaatcagaagttcaagggcaaggccacactgactgtagacaaatcctccagcacagcctacatgcagctcagcagcctgac
atctgaagactctgcggtctatttctgtgcaagagtggtgtactatagtaactcttactggtacttcgatgtctggggcacagggaccac
ggtcaccgtctcttctgatcaggagcccaaatcttctgacaaaactcacacatccccaccgtccccagcacctgaactcctgggggga
ccgtcagtcttcctcttccccccaaaacccaaggacaccctcatgatctcccggacccctgaggtcacatgcgtggtggtggacgtga
gccacgaagaccctgaggtcaagttcaactggtacgtggacggcgtggaggtgcataatgccaagacaaagccgcgggaggagc
agtacaacagcacgtaccgtgtggtcagcgtcctcaccgtcctgcaccaggactggctgaatggcaaggagtacaagtgcaaggtc
tccaacaaagccctcccagcccccatcgagaaaacaatctccaaagccaaagggcagccccgagaaccacaggtgtacaccctg
cccccatcccgggaggagatgaccaagaaccaggtcagcctgacctgcctggtcaaaggcttctatcccagcgacatcgccgtgg
agtgggagagcaatgggcagccggagaacaactacaagaccacgcctcccgtgctggactccgacggctccttctacctctatagc
aagctcaccgtggacaagagcaggtggcagcaggggaacgtcttctcatgctccgtgatgcatgaggctctgcacaaccactacac
gcagaagagcctctccctgtccccgggtaaatgatctaga
AA
2H7 scFv MTH (SSS) WTCH2MTCH3Y405 (amino acid sequence)
MDFQVQIFSFLLISASVIIARGQIVLSQSPAILSASPGEKVTMTCRASSSVSYMHWYQ
QKPGSSPKPWIYAPSNLASGVPARFSGSGSGTSYSLTISRVEAEDAATYYCQQWSFN
PPTFGAGTKLELKDGGGSGGGGSGGGGSSQAYLQQSGAELVRPGASVKMSCKASG
YTFTSYNMHWVKQTPRQGLEWIGAIYPGNGDTSYNQKFKGKATLTVDKSSSTAYM
QLSSLTSEDSAVYFCARVVYYSNSYWYFDVWGTGTTVTVSSDQEPKSSDKTHTSPP
SPAPELLGGPSVFLFPPKPKDTLMISRTPEVTCVVVDVSHEDPEVKFNWYVDGVEV
HNAKTKPREEQYNSTYRVVSVLTVLHQDWLNGKEYKCKVSNKALPAPIEKTISKA
KGQPREPQVYTLPPSREEMTKNQVSLTCLVKGFYPSDIAVEWESNGQPENNYKTTP
PVLDSDGSFYLYSKLTVDKSRWQQGNVFSCSVMHEALHNHYTQKSLSLSPGK
NT
2H7 scFv MTH (SSS) WTCH2MTCH3A405 (nucleotide sequence)
aagctgccgccatggattttcaagtgcagattttcagcttcctgctaatcagtgcttcagtcataattgccagaggacaaattgttctctc
ccagtctccagcaatcctgtctgcatctccaggggagaaggtcacaatgacttgcagggccagctcaagtgtaagttacatgcactgg
taccagcagaagccaggatcctcccccaaaccctggatttatgccccatccaacctggcttctggagtccctgctcgcttcagtggca
gtgggtctgggacctcttactctctcacaatcagcagagtggaggctgaagatgctgccacttattactgccagcagtggagttttaac
ccacccacgttcggtgctgggaccaagctggagctgaaagatggcggtggctcgggcggtggtggatctggaggaggtgggagc
tctcaggcttatctacagcagtctggggctgagctggtgaggcctggggcctcagtgaagatgtcctgcaaggcttctggctacacat
ttaccagttacaatatgcactgggtaaagcagacacctagacagggcctggaatggattggagctatttatccaggaaatggtgatact
tcctacaatcagaagttcaagggcaaggccacactgactgtagacaaatcctccagcacagcctacatgcagctcagcagcctgac
atctgaagactctgcggtctatttctgtgcaagagtggtgtactatagtaactcttactggtacttcgatgtctggggcacagggaccac
ggtcaccgtctcttctgatcaggagcccaaatcttctgacaaaactcacacatccccaccgtccccagcacctgaactcctgggggga
ccgtcagtcttcctcttccccccaaaacccaaggacaccctcatgatctcccggacccctgaggtcacatgcgtggtggtggacgtga
gccacgaagaccctgaggtcaagttcaactggtacgtggacggcgtggaggtgcataatgccaagacaaagccgcgggaggagc
agtacaacagcacgtaccgtgtggtcagcgtcctcaccgtcctgcaccaggactggctgaatggcaaggagtacaagtgcaaggtc
tccaacaaagccctcccagcccccatcgagaaaacaatctccaaagccaaagggcagccccgagaaccacaggtgtacaccctg
cccccatcccgggaggagatgaccaagaaccaggtcagcctgacctgcctggtcaaaggcttctatcccagcgacatcgccgtgg
agtgggagagcaatgggcagccggagaacaactacaagaccacgcctcccgtgctggactccgacggctccttcgccctctatag
caagctcaccgtggacaagagcaggtggcagcaggggaacgtcttctcatgctccgtgatgcatgaggctctgcacaaccactaca
cgcagaagagcctctccctgtccccgggtaaatga
AA
2H7 scFv MTH (SSS) WTCH2MTCH3A405 (nucleotide sequence)
mdfqvqifsfllisasviiargqivlsqspailsaspgekvtmtcrasssvsymhwyqqkpgsspkpwiyapsnlasgvparfsg
sgsgtsysltisrveaedaatyycqqwsfnpptfgagtklelkdgggsggggsggggssqaylqqsgaelvrpgasvkmsckas
gytftsynmhwvkqtprqglewigaiypgngdtsynqkfkgkatltvdkssstaymqlssltsedsavyfcarvvyysnsywy
fdvwgtgttvtvssdqepkssdkthtsppspapellggpsvflfppkpkdtlmisrtpevtcvvvdvshedpevkfnwyvdgv
evhnaktkpreeqynstyrvvsvltvlhqdwlngkeykckvsnkalpapiektiskakgqprepqvytlppsreemtknqvslt
clvkgfypsdiavewesngqpennykttppvldsdgsfalyskltvdksrwqqgnvfscsvmhealhnhytqkslslspgk
NT
2H7 scFv MTH (SSS) WTCH2MTCH3A407 (nucleotide sequence)
aagcttgccgccatggattttcaagtgcagattttcagcttcctgctaatcagtgcttcagtcataattgccagaggacaaattgttctctc
ccagtctccagcaatcctgtctgcatctccaggggagaaggtcacaatgacttgcagggccagctcaagtgtaagttacatgcactgg
taccagcagaagccaggatcctcccccaaaccctggatttatgccccatccaacctggcttctggagtccctgctcgcttcagtggca
gtgggtctgggacctcttactctctcacaatcagcagagtggaggctgaagatgctgccacttattactgccagcagtggagttttaac
ccacccacgttcggtgctgggaccaagctggagctgaaagatggcggtggctcgggcggtggtggatctggaggaggtgggagc
tctcaggcttatctacagcagtctggggctgagctggtgaggcctggggcctcagtgaagatgtcctgcaaggcttctggctacacat
ttaccagttacaatatgcactgggtaaagcagacacctagacagggcctggaatggattggagctatttatccaggaaatggtgatact
tcctacaatcagaagttcaagggcaaggccacactgactgtagacaaatcctccagcacagcctacatgcagctcagcagcctgac
atctgaagactctgcggtctatttctgtgcaagagtggtgtactatagtaactcttactggtacttcgatgtctggggcacagggaccac
ggtcaccgtctcttctgatcaggagcccaaatcttctgacaaaactcacacatccccaccgtccccagcacctgaactcctgggggga
ccgtcagtcttcctcttccccccaaaacccaaggacaccctcatgatctcccggacccctgaggtcacatgcgtggtggtggacgtga
gccacgaagaccctgaggtcaagttcaactggtacgtggacggcgtggaggtgcataatgccaagacaaagccgcgggaggagc
agtacaacagcacgtaccgtgtggtcagcgtcctcaccgtcctgcaccaggactggctgaatggcaaggagtacaagtgcaaggtc
tccaacaaagccctcccagcccccatcgagaaaacaatctccaaagccaaagggcagccccgagaaccacaggtgtacaccctg
cccccatcccgggaggagatgaccaagaaccaggtcagcctgacctgcctggtcaaaggcttctatcccagcgacatcgccgtgg
agtgggagagcaatgggcagccggagaacaactacaagaccacgcctcccgtgctggactccgacggctccttcttcctcgccag
caagctcaccgtggacaagagcaggtggcagcaggggaacgtcttctcatgctccgtgatgcatgaggctctgcacaaccactaca
cgcagaagagcctctccctgtccccgggtaaatga
AA
2H7 scFv MTH (SSS) WTCH2MTCH3A407 (amino acid sequence)
MDFQVQIFSFLLISASVIIARGQIVLSQSPAILSASPGEKVTMTCRASSSVSYMHWYQ
QKPGSSPKPWIYAPSNLASGVPARFSGSGSGTSYSLTISRVEAEDAATYYCQQWSFN
PPTFGAGTKLELKDGGGSGGGGSGGGGSSQAYLQQSGAELVRPGASVKMSCKASG
YTFTSYNMHWVKQTPRQGLEWIGAIYPGNGDTSYNQKFKGKATLTVDKSSSTAYM
QLSSLTSEDSAVYFCARVVYYSNSYWYFDVWGTGTTVTVSSDQEPKSSDKTHTSPP
SPAPELLGGPSVFLFPPKPKDTLMISRTPEVTCVVVDVSHEDPEVKFNWYVDGVEV
HNAKTKPREEQYNSTYRVVSVLTVLHQDWLNGKEYKCKVSNKALPAPIEKTISKA
KGQPREPQVYTLPPSREEMTKNQVSLTCLVKGFYPSDIAVEWESNGQPENNYKTTP
PVLDSDGSFFLASKLTVDKSRWQQGNVFSCSVMHEALHNHYTQKSLSLSPGK
NT
2H7 scFv MTH (SSS) WTCH2MTCH3Y405A407 (nucleotide sequence)
aagcttgccgccatggattttcaagtgcagattttcagcttcctgctaatcagtgcttcagtcataattgccagaggacaaattgttctctc
ccagtctccagcaatcctgtctgcatctccaggggagaaggtcacaatgacttgcagggccagctcaagtgtaagttacatgcactgg
taccagcagaagccaggatcctcccccaaaccctggatttatgccccatccaacctggcttctggagtccctgctcgcttcagtggca
gtgggtctgggacctcttactctctcacaatcagcagagtggaggctgaagatgctgccacttattactgccagcagtggagttttaac
ccacccacgttcggtgctgggaccaagctggagctgaaagatggcggtggctcgggcggtggtggatctggaggaggtgggagc
tctcaggcttatctacagcagtctggggctgagctggtgaggcctggggcctcagtgaagatgtcctgcaaggcttctggctacacat
ttaccagttacaatatgcactgggtaaagcagacacctagacagggcctggaatggattggagctatttatccaggaaatggtgatact
tcctacaatcagaagttcaagggcaaggccacactgactgtagacaaatcctccagcacagcctacatgcagctcagcagcctgac
atctgaagactctgcggtctatttctgtgcaagagtggtgtactatagtaactcttactggtacttcgatgtctggggcacagggaccac
ggtcaccgtctcttctgatcaggagcccaaatcttctgacaaaactcacacatccccaccgtccccagcacctgaactcctgggggga
ccgtcagtcttcctcttccccccaaaacccaaggacaccctcatgatctcccggacccctgaggtcacatgcgtggtggtggacgtga
gccacgaagaccctgaggtcaagttcaactggtacgtggacggcgtggaggtgcataatgccaagacaaagccgcgggaggagc
agtacaacagcacgtaccgtgtggtcagcgtcctcaccgtcctgcaccaggactggctgaatggcaaggagtacaagtgcaaggtc
tccaacaaagccctcccagcccccatcgagaaaacaatctccaaagccaaagggcagccccgagaaccacaggtgtacaccctg
cccccatcccgggaggagatgaccaagaaccaggtcagcctgacctgcctggtcaaaggcttctatcccagcgacatcgccgtgg
agtgggagagcaatgggcagccggagaacaactacaagaccacgcctcccgtgctggactccgacggctccttctacctcgccag
caagctcaccgtggacaagagcaggtggcagcaggggaacgtcttctcatgctccgtgatgcatgaggctctgcacaaccactaca
cgcagaagagcctctccctgtccccgggtaaatga
AA
2H7 scFv MTH (SSS) WTCH2MTCH3Y405A407 (amino acid sequence)
MDFQVQIFSFLLISASVIIARGQIVLSQSPAILSASPGEKVTMTCRASSSVSYMHWYQ
QKPGSSPKPWIYAPSNLASGVPARFSGSGSGTSYSLTISRVEAEDAATYYCQQWSFN
PPTFGAGTKLELKDGGGSGGGGSGGGGSSQAYLQQSGAELVRPGASVKMSCKASG
YTFTSYNMHWVKQTPRQGLEWIGAIYPGNGDTSYNQKFKGKATLTVDKSSSTAYM
QLSSLTSEDSAVYFCARVVYYSNSYWYFDVWGTGTTVTVSSDQEPKSSDKTHTSPP
SPAPELLGGPSVFLFPPKPKDTLMISRTPEVTCVVVDVSHEDPEVKFNWYVDGVEV
HNAKTKPREEQYNSTYRVVSVLTVLHQDWLNGKEYKCKVSNKALPAPIEKTISKA
KGQPREPQVYTLPPSREEMTKNQVSLTCLVKGFYPSDIAVEWESNGQPENNYKTTP
PVLDSDGSFYLASKLTVDKSRWQQGNVFSCSVMHEALHNHYTQKSLSLSPGK
NT
2H7 scFv MTH (SSS) WTCH2MTCH3A405A407 (nucleotide sequence)
aagcttgccgccatggattttcaagtgcagattttcagcttcctgctaatcagtgcttcagtcataattgccagaggacaaattgttctctc
ccagtctccagcaatcctgtctgcatctccaggggagaaggtcacaatgacttgcagggccagctcaagtgtaagttacatgcactgg
taccagcagaagccaggatcctcccccaaaccctggatttatgccccatccaacctggcttctggagtccctgctcgcttcagtggca
gtgggtctgggacctcttactctctcacaatcagcagagtggaggctgaagatgctgccacttattactgccagcagtggagttttaac
ccacccacgttcggtgctgggaccaagctggagctgaaagatggcggtggctcgggcggtggtggatctggaggaggtgggagc
tctcaggcttatctacagcagtctggggctgagctggtgaggcctggggcctcagtgaagatgtcctgcaaggcttctggctacacat
ttaccagttacaatatgcactgggtaaagcagacacctagacagggcctggaatggattggagctatttatccaggaaatggtgatact
tcctacaatcagaagttcaagggcaaggccacactgactgtagacaaatcctccagcacagcctacatgcagctcagcagcctgac
atctgaagactctgcggtctatttctgtgcaagagtggtgtactatagtaactcttactggtacttcgatgtctggggcacagggaccac
ggtcaccgtctcttctgatcaggagcccaaatcttctgacaaaactcacacatccccaccgtccccagcacctgaactcctgggggga
ccgtcagtcttcctcttccccccaaaacccaaggacaccctcatgatctcccggacccctgaggtcacatgcgtggtggtggacgtga
gccacgaagaccctgaggtcaagttcaactggtacgtggacggcgtggaggtgcataatgccaagacaaagccgcgggaggagc
agtacaacagcacgtaccgtgtggtcagcgtcctcaccgtcctgcaccaggactggctgaatggcaaggagtacaagtgcaaggtc
tccaacaaagccctcccagcccccatcgagaaaacaatctccaaagccaaagggcagccccgagaaccacaggtgtacaccctg
cccccatcccgggaggagatgaccaagaaccaggtcagcctgacctgcctggtcaaaggcttctatcccagcgacatcgccgtgg
agtgggagagcaatgggcagccggagaacaactacaagaccacgcctcccgtgctggactccgacggctccttcgccctcgcca
gcaagctcaccgtggacaagagcaggtggcagcaggggaacgtcttctcatgctccgtgatgcatgaggctctgcacaaccactac
acgcagaagagcctctccctgtccccgggtaaatga
AA
2H7 scFv MTH (SSS) WTCH2MTCH3A405A407 (amino acid sequence)
MDFQVQIFSFLLISASVIIARGQIVLSQSPAILSASPGEKVTMTCRASSSVSYMHWYQ
QKPGSSPKPWIYAPSNLASGVPARFSGSGSGTSYSLTISRVEAEDAATYYCQQWSFN
PPTFGAGTKLELKDGGGSGGGGSGGGGSSQAYLQQSGAELVRPGASVKMSCKASG
YTFTSYNMHWVKQTPRQGLEWIGAIYPGNGDTSYNQKFKGKATLTVDKSSSTAYM
QLSSLTSEDSAVYECARVVYYSNSYWYEDVWGTGTTVTVSSDQEPKSSDKTHTSPP
SPAPELLGGPSVFLFPPKPKDTLMISRTPEVTCVVVDVSHEDPEVKFNWYVDGVEV
HNAKTKPREEQYNSTYRVVSVLTVLHQDWLNGKEYKCKVSNKALPAPIEKTISKA
KGQPREPQVYTLPPSREEMTKNQVSLTCLVKGFYPSDIAVEWESNGQPENNYKTTP
PVLDSDGSFALASKLTVDKSRWQQGNVFSCSVMHEALHNHYTQKSLSLSPGK
NT
2H7 scFv MTH (SCC) WTCH2CH3 (nucleotide sequence)
aagcttgccgccatggattttcaagtgcagattttcagcttcctgctaatcagtgcttcagtcataattgccagaggacaaattgttctctc
ccagtctccagcaatcctgtctgcatctccaggggagaaggtcacaatgacttgcagggccagctcaagtgtaagttacatgcactgg
taccagcagaagccaggatcctcccccaaaccctggatttatgccccatccaacctggcttctggagtccctgctcgcttcagtggca
gtgggtctgggacctcttactctctcacaatcagcagagtggaggctgaagatgctgccacttattactgccagcagtggagttttaac
ccacccacgttcggtgctgggaccaagctggagctgaaagatggcggtggctcgggcggtggtggatctggaggaggtgggagc
tctcaggcttatctacagcagtctggggctgagctggtgaggcctggggcctcagtgaagatgtcctgcaaggcttctggctacacat
ttaccagttacaatatgcactgggtaaagcagacacctagacagggcctggaatggattggagctatttatccaggaaatggtgatact
tcctacaatcagaagttcaagggcaaggccacactgactgtagacaaatcctccagcacagcctacatgcagctcagcagcctgac
atctgaagactctgcggtctatttctgtgcaagagtggtgtactatagtaactcttactggtacttcgatgtctggggcacagggaccac
ggtcaccgtctcttctgatcaggagcccaaatcttctgacaaaactcacacatgcccaccgtgcccagcacctgaactcctgggggg
accgtcagtcttcctcttccccccaaaacccaaggacaccctcatgatctcccggacccctgaggtcacatgcgtggtggtggacgtg
agccacgaagaccctgaggtcaagttcaactggtacgtggacggcgtggaggtgcataatgccaagacaaagccgcgggaggag
cagtacaacagcacgtaccgtgtggtcagcgtcctcaccgtcctgcaccaggactggctgaatggcaaggagtacaagtgcaaggt
ctccaacaaagccctcccagcccccatcgagaaaacaatctccaaagccaaagggcagccccgagaaccacaggtgtacaccct
gcccccatcccgggatgagctgaccaagaaccaggtcagcctgacctgcctggtcaaaggcttctatcccagcgacatcgccgtgg
agtgggagagcaatgggcagccggagaacaactacaagaccacgcctcccgtgctggactccgacggctccttcttcctctacagc
aagctcaccgtggacaagagcaggtggcagcaggggaacgtcttctcatgctccgtgatgcatgaggctctgcacaaccactacac
gcagaagagcctctccctgtctccgggtaaatgatctaga
AA
2H7 scFv MTH (SCC) WTCH2CH3 (amino acid sequence)
MDFQVQIFSFLLISASVIIARGQIVLSQSPAILSASPGEKVTMTCRASSSVSYMHWYQ
QKPGSSPKPWIYAPSNLASGVPARFSGSGSGTSYSLTISRVEAEDAATYYCQQWSFN
PPTFGAGTKLELKDGGGSGGGGSGGGGSSQAYLQQSGAELVRPGASVKMSCKASG
YTFTSYNMHWVKQTPRQGLEWIGAIYPGNGDTSYNQKFKGKATLTVDKSSSTAYM
QLSSLTSEDSAVYFCARVVYYSNSYWYFDVWGTGTTVTVSSDQEPKSSDKTHTSPP
CPAPELLGGPSVFLFPPKPKDTLMISRTPEVTCVVVDVSHEDPEVKFNWYVDGVEV
HNAKTKPREEQYNSTYRVVSVLTVLHQDWLNGKEYKCKVSNKALPAPIEKTISKA
KGQPREPQVYTLPPSRDELTKNQVSLTCLVKGFYPSDIAVEWESNGQPENNYKTTPP
VLDSDGSFFLYSKLTVDKSRWQQGNVFSCSVMHEALHNHYTQKSLSLSPGK
NT
2H7 scFv MTH (CSC) WTCH2CH3 (nucleotide sequence)
aagcttgccgccatggattttcaagtgcagattttcagcttcctgctaatcagtgcttcagtcataattgccagaggacaaattgttctctc
ccagtctccagcaatcctgtctgcatctccaggggagaaggtcacaatgacttgcagggccagctcaagtgtaagttacatgcactgg
taccagcagaagccaggatcctcccccaaaccctggatttatgccccatccaacctggcttctggagtccctgctcgcttcagtggca
gtgggtctgggacctcttactctctcacaatcagcagagtggaggctgaagatgctgccacttattactgccagcagtggagttttaac
ccacccacgttcggtgctgggaccaagctggagctgaaagatggcggtggctcgggcggtggtggatctggaggaggtgggagc
tctcaggcttatctacagcagtctggggctgagctggtgaggcctggggcctcagtgaagatgtcctgcaaggcttctggctacacat
ttaccagttacaatatgcactgggtaaagcagacacctagacagggcctggaatggattggagctatttatccaggaaatggtgatact
tcctacaatcagaagttcaagggcaaggccacactgactgtagacaaatcctccagcacagcctacatgcagctcagcagcctgac
atctgaagactctgcggtctatttctgtgcaagagtggtgtactatagtaactcuactggtacttcgatgtctggggcacagggaccac
ggtcaccgtctcttctgatcaggagcccaaatcttgtgacaaaactcacacatctccaccgtgcccagcacctgaactcctgggggga
ccgtcagtcttcctcttccccccaaaacccaaggacaccctcatgatctcccggacccctgaggtcacatgcgtggtggtggacgtga
gccacgaagaccctgaggtcaagttcaactggtacgtggacggcgtggaggtgcataatgccaagacaaagccgcgggaggagc
agtacaacagcacgtaccgtgtggtcagcgtcctcaccgtcctgcaccaggactggctgaatggcaaggagtacaagtgcaaggtc
tccaacaaagccctcccagcccccatcgagaaaacaatctccaaagccaaagggcagccccgagaaccacaggtgtacaccctg
cccccatcccgggatgagctgaccaagaaccaggtcagcctgacctgcctggtcaaaggcttctatcccagcgacatcgccgtgga
gtgggagagcaatgggcagccggagaacaactacaagaccacgcctcccgtgctggactccgacggctccttcttcctctacagca
agctcaccgtggacaagagcaggtggcagcaggggaacgtcttctcatgctccgtgatgcatgaggctctgcacaaccactacacg
cagaagagcctctccctgtctccgggtaaatgatctaga
AA
2H7 scFv MTH (CSC) WTCH2CH3 (amino acid sequence)
MDFQVQIFSFLLISASVIIARGQIVLSQSPAILSASPGEKVTMTCRASSSVSYMHWYQ
QKPGSSPKPWIYAPSNLASGVPARFSGSGSGTSYSLTISRVEAEDAATYYCQQWSFN
PPTFGAGTKLELKDGGGSGGGGSGGGGSSQAYLQQSGAELVRPGASVKMSCKASG
YTFTSYNMHWVKQTPRQGLEWIGAIYPGNGDTSYNQKFKGKATLTVDKSSSTAYM
QLSSLTSEDSAVYFCARVVYYSNSYWYFDVWGTGTTVTVSSDQEPKSCDKTHTSPP
CPAPELLGGPSVFLFPPKPKDTLMISRTPEVTCVVVDVSHEDPEVKFNWYVDGVEV
HNAKTKPREEQYNSTYRVVSVLTVLHQDWLNGKFYKCKVSNKALPAPIEKTISKA
KGQPREPQVYTLPPSRDELTKNQVSLTCLVKGFYPSDIAVEWESNGQPENNYKTTPP
VLDSDGSFFLYSKLTVDKSRWQQGNVFSCSVMHEALHNHYTQKSLSLSPGK
NT
2H7 scFv MTH (CCS) WTCH2CH3 (nucleotide sequence)
aagctgccgccatggattttcaagtgcagattttcagcttcctgctaatcagtgcttcagtcataattgccagaggacaaattgttctctc
ccagtctccagcaatcctgtctgcatctccaggggagaaggtcacaatgacttgcagggccagctcaagtgtaagttacatgcactgg
taccagcagaagccaggatcctcccccaaaccctggatttatgccccatccaacctggcttctggagtccctgctcgcttcagtggca
gtgggtctgggacctcttactctctcacaatcagcagagtggaggctgaagatgctgccacttattactgccagcagtggagttttaac
ccacccacgttcggtgctgggaccaagctggagctgaaagatggcggtggctcgggcggtggtggatctggaggaggtgggagc
tctcaggcttatctacagcagtctggggctgagctggtgaggcctggggcctcagtgaagatgtcctgcaaggcttctggctacacat
ttaccagttacaatatgcactgggtaaagcagacacctagacagggcctggaatggattggagctatttatccaggaaatggtgatact
tcctacaatcagaagttcaagggcaaggccacactgactgtagacaaatcctccagcacagcctacatgcagctcagcagcctgac
atctgaagactctgcggtctatttctgtgcaagagtggtgtactatagtaactcttactggtacttcgatgtctggggcacagggaccac
ggtcaccgtctcttctgatcaggagcccaaatcttgtgacaaaactcacacatgtccaccgtccccagcacctgaactcctgggggga
ccgtcagtcttcctcttccccccaaaacccaaggacaccctcatgatctcccggacccctgaggtcacatgcgtggtggtggacgtga
gccacgaagaccctgaggtcaagttcaactggtacgtggacggcgtggaggtgcataatgccaagacaaagccgcgggaggagc
agtacaacagcacgtaccgtgtggtcagcgtcctcaccgtcctgcaccaggactggctgaatggcaaggagtacaagtgcaaggtc
tccaacaaagccctcccagcccccatcgagaaaacaatctccaaagccaaagggcagccccgagaaccacaggtgtacaccctg
cccccatcccgggatgagctgaccaagaaccaggtcagcctgacctgcctggtcaaaggcttctatcccagcgacatcgccgtgga
gtgggagagcaatgggcagccggagaacaactacaagaccacgcctcccgtgctggactccgacggctccttcttcctctacagca
agctcaccgtggacaagagcaggtggcagcaggggaacgtcttctcatgctccgtgatgcatgaggctctgcacaaccactacacg
cagaagagcctctccctgtctccgggtaaatgatctaga
AA
2H7 scFv MTH (CCS) WTCH2CH3 (amino acid sequence)
MDFQVQIFSFLLISASVIIARGQIVLSQSPAILSASPGEKVTMTCRASSSVSYMHWYQ
QKPGSSPKPWIYAPSNLASGVPARFSGSGSGTSYSLTISRVEAEDAATYYCQQWSFN
PPTFGAGTKLELKDGGGSGGGGSGGGGSSQAYLQQSGAELVRPGASVKMSCKASG
YTFTSYNMHWVKQTPRQGLEWIGAIYPGNGDTSYNQKFKGKATLTVDKSSSTAYM
QLSSLTSEDSAVYFCARVVYYSNSYWYFDVWGTGTTVTVSSDQEPKSCDKTHTCPP
SPAPELLGGPSVFLFPPKPKDTLMISRTPEVTCVVVDVSHEDPEVKFNWYVDGVEV
HNAKTKPREEQYNSTYRVVSVLTVLHQDWLNGKEYKCKVSNKALPAPIEKTISKA
KGQPREPQVYTLPPSRDELTKNQVSLTCLVKGFYPSDIAVEWESNGQPENNYKTTPP
VLDSDGSFFLYSKLTVDKSRWQQGNVFSCSVMHEALHNHYTQKSLSLSPGK
NT
HuIgAHIgA-T4-ORF (nucleotide sequence)
tgatcagccagttccctcaactccacctaccccatctccctcaactccacctaccccatctccctcatgctgccacccccgactgtcact
gcaccgaccggccctcgaggacctgctcttaggttcagaagcgatcctcacgtgcacactgaccggcctgagagatgcctcaggtg
tcaccttcacctggacgccctcaagtgggaagagcgctgttcaaggaccacctgaccgtgacctctgtggctgctacagcgtgtcca
gtgtcctgccgggctgtgccgagccatggaaccatgggaagaccttcacttgcactgctgcctaccccgagtccaagaccccgcta
accgccaccctctcaaaatccggaaacacattccggcccgaggtccacctgctgccgccgccgtcggaggagctggccctgaacg
agctggtgacgctgacgtgcctggcacgtggcttcagccccaaggatgtgctggttcgctggctgcaggggtcacaggagctgccc
cgcgagaagtacctgacttgggcatcccggcaggagcccagccagggcaccaccaccttcgctgtgaccagcatactgcgcgtgg
cagccgaggactggaagaagggggacaccttctcctgcatggtgggccacgaggccctgccgctggccttcacacagaagacca
tcgaccgcttggcgggtaaacccacccatgtcaatgtgtctgttgtcatggcggaggtggacgcggatccttcgaac
AA
HuIgAHIgA-T4-ORF (amino acid sequence)
DQPVPSTPPTPSPSTPPTPSPSCCHPRLSLHRPALEDLLLGSEAILTCTLTGLRDASGVT
FTWTPSSGKSAVQGPPDRDLCGCYSVSSVLPGCAEPWNHGKTFTCTAAYPESKTPL
TATLSKSGNTFRPEVHLLPPPSEELALNELVTLTCLARGFSPKDVLVRWLQGSQELP
REKYLTWASRQEPSQGTTTFAVTSILRVAAEDWKKGDTFSCMVGHEALPLAFTQKT
IDRLAGKPTHVNVSVVMAEVDADPSN
NT
HuIgAHIgA-T4-ORF (nucleotide sequence)
tgatcagccagttccctcaactccacctaccccatctccctcaactccacctaccccatctccctcatgctgccacccccgactgtcact
gcaccgaccggccctcgaggacctgctcttaggttcagaagcgatcctcacgtgcacactgaccggcctgagagatgcctcaggtg
tcaccttcacctggacgccctcaagtgggaagagcgctgttcaaggaccacctgaccgtgacctctgtggctgctacagcgtgtcca
gtgtcctgccgggctgtgccgagccatggaaccatgggaagaccttcacttgcactgctgcctaccccgagtccaagaccccgcta
accgccaccctctcaaaatccggaaacacattccggcccgaggtccacctgctgccgccgccgtcggaggagctggccctgaacg
agctggtgacgctgacgtgcctggcacgtggcttcagccccaaggatgtgctggttcgctggctgcaggggtcacaggagctgccc
cgcgagaagtacctgacttgggcatcccggcaggagcccagccagggcaccaccaccttcgctgtgaccagcatactgcgcgtgg
cagccgaggactggaagaagggggacaccttctcctgcatggtgggccacgaggccctgccgctggccttcacacagaagacca
tcgaccgcttggcgggtaaacccacccatgtcaatgtgtctgttgtcatggcggaggtggacgcggatccttcgaac
AA
HuIgAHIgA-T4-ORF (amino acid sequence)
DQPVPSTPPTPSPSTPPTPSPSCCHPRLSLHRPALEDLLLGSEAILTCTLTGLRDASGVT
FTWTPSSGKSAVQGPPDRDLCGCYSVSSVLPGCAEPWNHGKTFTCTAAYPESKTPL
TATLSKSGNTFRPEVHLLPPPSEELALNELVTLTCLARGFSPKDVLVRWLQGSQELP
REKYLTWASRQEPSQGTTTFAVTSILRVAAEDWKKGDTFSCMVGHEALPLAFTQKT
IDRLAGKPTHVNVSVVMAEVDADPSN
NT
1D8-IgAH IgA-T4-CD80 (nucleotide sequence)
aagcttatggattttcaagtgcagattttcagcttcctgctaatcagtgcttcagtcataatgtccagaggagtcgacattgtgctcactca
gtctccaacaaccatagctgcatctccaggggagaaggtcaccatcacctgccgtgccagctccagtgtaagttacatgtactggtac
cagcagaagtcaggcgcctcccctaaactctggatttatgacacatccaagctggcttctggagttccaaatcgcttcagtggcagtg
ggtctgggacctcttattctctcgcaatcaacaccatggagactgaagatgctgccacttattactgtcagcagtggagtagtactccgc
tcacgttcgggtctgggaccaagctggagatcaaacggggtggcggtggctcgggcggtggtgggtcgggtggcggcggatctc
aggtgcagctgaaggaggcaggacctggcctggtgcaaccgacacagaccctgtccctcacatgcactgtctctgggttctcattaa
ccagcgatggtgtacactggattcgacagcctccaggaaagggtctggaatggatgggaataatatattatgatggaggcacagatt
ataattcagcaattaaatccagactgagcatcagcagggacacctccaagagccaagttttcttaaaaatcaacagtctgcaaactgat
gacacagccatgtattactgtgccagaatccactttgattactggggccaaggagtcatggtcacagtctcctctgatcagccagttcc
ctcaactccacctaccccatctccctcaactccacctaccccatctccctcatgctgccacccccgactgtcactgcaccgaccggcc
ctcgaggacctgctcttaggttcagaagcgatcctcacgtgcacactgaccggcctgagagatgcctcaggtgtcaccttcacctgga
cgccctcaagtgggaagagcgctgttcaaggaccacctgaccgtgacctctgtggctgctacagcgtgtccagtgtcctgccgggct
gtgccgagccatggaaccatgggaagaccttcacttgcactgctgcctaccccgagtccaagaccccgctaaccgccaccctctca
aaatccggaaacacattccggcccgaggtccacctgctgccgccgccgtcggaggagctggccctgaacgagctggtgacgctg
acgtgcctggcacgtggcttcagccccaaggatgtgctggttcgctggctgcaggggtcacaggagctgccccgcgagaagtacct
gacttgggcatcccggcaggagcccagccagggcaccaccaccttcgctgtgaccagcatactgcgcgtggcagccgaggactg
gaagaagggggacaccttctcctgcatggtgggccacgaggccctgccgctggccttcacacagaagaccatcgaccgcttggcg
ggtaaacccacccatgtcaatgtgtctgttgtcatggcggaggtggacgcggatccttcgaacaacctgctcccatcctgggccatta
ccttaatctcagtaaatggaatttttgtgatatgctgcctgacctactgctttgccccaagatgcagagagagaaggaggaatgagaga
ttgagaagggaaagtgtacgccctgtataaatcgatac
AA
1D8 scFv IgAH IgA-T4-CD80 (amino acid sequence)
MDFQVQIFSFLLISASVIMSRGVDIVLTQSPTTIAASPGEKVTITCRASSSVSYMYWY
QQKSGASPKLWIYDTSKLASGVPNRFSGSGSGTSYSLAINTMETEDAATYYCQQWS
STPLTFGSGTKLEIKRGGGGSGGGGSGGGGSQVQLKEAGPGLVQPTQTLSLTCTVSG
FSLTSDGVHWIRQPPGKGLEWMGIIYYDGGTDYNSAIKSRLSISRDTSKSQVFLKINS
LQTDDTAMYYCARIHFDYWGQGVMVTVSSDQPVPSTPPTPSPSTPPTPSPSCCHPRL
SLHRPALEDLLLGSEAILTCTLTGLRDASGVTFTWTPSSGKSAVQGPPDRDLCGCYS
VSSVLPGCAEPWNHGKTFTCTAAYPESKTPLTATLSKSGNTFRPEVHLLPPPSEELAL
NELVTLTCLARGFSPKDVLVRWLQGSQELPREKYLTWASRQEPSQGTTTFAVTSILR
VAAEDWKKGDTFSCMVGHEALPLAFTQKTIDRLAGKPTHVNVSVVMAEVDADPS
NNLLPSWAITLISVNGIFVICCLTYCFAPRCRERRRNERLRRESVRPV
NT
human IgE Fc (CH2—CH3—CH4) ORF (nucleotide sequence)
tgatcacgtctgctccagggacttcaccccgcccaccgtgaagatcttacagtcgtcctgcgacggcggcgggcacttccccccgac
catccagctcctgtgcctcgtctctgggtacaccccagggactatcaacatcacctggctggaggacgggcaggtcatggacgtgg
acttgtccaccgcctctaccacgcaggagggtgagctggcctccacacaaagcgagctcaccctcagccagaagcactggctgtca
gaccgcacctacacctgccaggtcacctatcaaggtcacacctttgaggacagcaccaagaagtgtgcagattccaacccgagagg
ggtgagcgcctacctaagccggcccagcccgttcgacctgttcatccgcaagtcgcccacgatcacctgtctggtggtggacctggc
acccagcaaggggaccgtgaacctgacctggtcccgggccagtgggaagcctgtgaaccactccaccagaaaggaggagaagc
agcgcaatggcacgttaaccgtcacgtccaccctgccggtgggcacccgagactggatcgagggggagacctaccagtgcaggg
tgacccacccccacctgcccagggccctcatgcggtccacgaccaagaccagcggcccgcgtgctgccccggaagtctatgcgtt
tgcgacgccggagtggccggggagccgggacaagcgcaccctcgcctgcctgatccagaacttcatgcctgaggacatctcggtg
cagtggctgcacaacgaggtgcagctcccggacgcccggcacagcacgacgcagccccgcaagaccaagggctccggcttcttc
gtcttcagccgcctggaggtgaccagggccgaatgggagcagaaagatgagttcatctgccgtgcagtccatgaggcagcgagcc
cctcacagaccgtccagcgagcggtgtctgtaaatcccggtaaagcggatccttcgaa
AA
human IgE Fc (CH2—CH3—CH4) ORF (amino acid sequence)
DHVCSRDFTPPTVKILQSSCDGGGHFPPTIQLLCLVSGYTPGTINITWLEDGQVMDV
DLSTASTTQEGELASTQSELTLSQKHWLSDRTYTCQVTYQGHTFEDSTKKCADSNP
RGVSAYLSRPSPFDLFIRKSPTITCLVVDLAPSKGTVNLTWSRASGKPVNHSTRKEEK
QRNGTLTVTSTLPVGTRDWIEGETYQCRVTHPHLPRALMRSTTKTSGPRAAPEVYA
FATPEWPGSRDKRTLACLIQNFMPEDISVQWLHNEVQLPDARHSTTQPRKTKGSGF
FVFSRLEVTRAEWEQKDEFICRAVHEAASPSQTVQRAVSVNPGKADPS
NT
1D8 scFv-human IgE Fe (CH2—CH3—CH4)-CD80 (nucleotide sequence)
aagcttatggattttcaagtgcagattttcagcttcctgctaatcagtgcttcagtcataatgtccagaggagtcgacattgtgctcactca
gtctccaacaaccatagctgcatctccaggggagaaggtcaccatcacctgccgtgccagctccagtgtaagttacatgtactggtac
cagcagaagtcaggcgcctcccctaaactctggatttatgacacatccaagctggcttctggagttccaaatcgcttcagtggcagtg
ggtctgggacctcttattctctcgcaatcaacaccatggagactgaagatgctgccacttattactgtcagcagtggagtagtactccgc
tcacgttcgggtctgggaccaagctggagatcaaacggggtggcggtggctcgggcggtggtgggtcgggtggcggcggatctc
aggtgcagctgaaggaggcaggacctggcctggtgcaaccgacacagaccctgtccctcacatgcactgtctctgggttctcattaa
ccagcgatggtgtacactggattcgacagcctccaggaaagggtctggaatggatgggaataatatattatgatggaggcacagatt
ataattcagcaattaaatccagactgagcatcagcagggacacctccaagagccaagttttcttaaaaatcaacagtctgcaaactgat
gacacagccatgtattactgtgccagaatccactttgattactggggccaaggagtcatggtcacagtctcctctgatcacgtctgctcc
agggacttcaccccgcccaccgtgaagatcttacagtcgtcctgcgacggcggcgggcacttccccccgaccatccagctcctgtg
cctcgtctctgggtacaccccagggactatcaacatcacctggctggaggacgggcaggtcatggacgtggacttgtccaccgcctc
taccacgcaggagggtgagctggcctccacacaaagcgagctcaccctcagccagaagcactggctgtcagaccgcacctacac
ctgccaggtcacctatcaaggtcacacctttgaggacagcaccaagaagtgtgcagattccaacccgagaggggtgagcgcctacc
taagccggcccagcccgttcgacctgttcatccgcaagtcgcccacgatcacctgtctggtggtggacctggcacccagcaagggg
accgtgaacctgacctggtcccgggccagtgggaagcctgtgaaccactccaccagaaaggaggagaagcagcgcaatggcac
gttaaccgtcacgtccaccctgccggtgggcacccgagactggatcgagggggagacctaccagtgcagggtgacccaccccca
cctgcccagggccctcatgcggtccacgaccaagaccagcggcccgcgtgctgccccggaagtctatgcgtttgcgacgccgga
gtggccggggagccgggacaagcgcaccctcgcctgcctgatccagaacttcatgcctgaggacatctcggtgcagtggctgcac
aacgaggtgcagctcccggacgcccggcacagcacgacgcagccccgcaagaccaagggctccggcttcttcgtcttcagccgc
ctggaggtgaccagggccgaatgggagcagaaagatgagttcatctgccgtgcagtccatgaggcagcgagcccctcacagacc
gtccagcgagcggtgtctgtaaatcccggtaaagcggatccttcgaagctcccatcctgggccattaccttaatctcagtaaatggaat
ttttgtgatatgctgcctgacctactgctttgccccaagatgcagagagagaaggaggaatgagagattgagaagggaaagtgtacg
ccctgtataaatcgata
AA
1D8-scFv-human IgE Fe (CH2—CH3—CH4)-CD80 (amino acid sequence)
MDFQVQIFSFLLISASVIMSRGVDIVLTQSPTTIAASPGEKVTITCRASSSVSYMYWY
QQKSGASPKLWIYDTSKLASGVPNRFSGSGSGTSYSLAINTMETEDAATYYCQQWS
STPLTFGSGTKLEIKRGGGGSGGGGSGGGGSQVQLKEAGPGLVQPTQTLSLTCTVSG
FSLTSDGVHWIRQPPGKGLEWMGIIYYDGGTDYNSAIKSRLSISRDTSKSQVFLKTNS
LQTDDTAMYYCARIHFDYWGQGVMVTVSSDHVCSRDFTPPTVKILQSSCDGGGHF
PPTIQLLCLVSGYTPGTINITWLEDGQVMDVDLSTASTTQEGELASTQSELTLSQKH
WLSDRTYTCQVTYQGHTFEDSTKKCADSNPRGVSAYLSRPSPFDLFIRKSPTITCLV
VDLAPSKGTVNLTWSRASGKPVNHSTRKEEKQRNGTLTVTSTLPVGTRDWIEGETY
QCRVTHPHLPRALMRSTTKTSGPRAAPEVYAFATPEWPGSRDKRTLACLIQNFMPE
DISVQWLHNEVQLPDARHSTTQPRKTKGSGFFVFSRLEVTRAEWEQKDEFICRAVH
EAASPSQTVQRAVSVNPGKADPSKLPSWAITLISVNGIFVICCLTYCFAPRCRERRRN
ERLRRESVRPV
NT
5B9-IgAH IgA-T4-CD80 (nucleotide sequence)
aagcttgccgccatgaggttctctgctcagcttctggggctgcttgtgctctggatccctggatccactgcagatattgtgatgacgcag
gctgcattctccaatccagtcactcttggaacatcagcttccatctcctgcaggtctagtaagagtctcctacatagtaatggcatcactta
tttgtattggtatctgcagaagccaggccagtctcctcagctcctgatttatcagatgtccaaccttgcctcaggagtcccagacaggttc
agtagcagtgggtcaggaactgatttcacactgagaatcagcagagtggaggctgaggatgtgggtgtttattactgtgctcaaaatct
agaacttccgctcacgttcggtgctgggaccaagctggagctgaaacggggtggcggtggctcgggcggtggtgggtcgggtgg
cggcggatcgtcacaggtgcagctgaagcagtcaggacctggcctagtgcagtcctcacagagcctgtccatcacctgcacagtct
ctggtttctcattaactacctatgctgtacactgggttcgccagtctccaggaaagggtctggagtggctgggagtgatatggagtggt
ggaatcacagactataatgcagctttcatatccagactgagcatcaccaaggacgattccaagagccaagttttctttaaaatgaacagt
ctgcaacctaatgacacagccatttattactgtgccagaaatgggggtgataactacccttattactatgctatggactactggggtcaa
ggaacctcagtcaccgtctcctctgatcagccagttccctcaactccacctaccccatctccctcaactccacctaccccatctccctca
tgctgccacccccgactgtcactgcaccgaccggccctcgaggacctgctcttaggttcagaagcgatcctcacgtgcacactgacc
ggcctgagagatgcctcaggtgtcaccttcacctggacgccctcaagtgggaagagcgctgttcaaggaccacctgaccgtgacct
ctgtggctgctacagcgtgtccagtgtcctgccgggctgtgccgagccatggaaccatgggaagaccttcacttgcactgctgcctac
cccgagtccaagaccccgctaaccgccaccctctcaaaatccggaaacacattccggcccgaggtccacctgctgccgccgccgt
cggaggagctggccctgaacgagctggtgacgctgacgtgcctggcacgtggcttcagccccaaggatgtgctggttcgctggct
gcaggggtcacaggagctgccccgcgagaagtacctgacttgggcatcccggcaggagcccagccagggcaccaccaccttcg
ctgtgaccagcatactgcgcgtggcagccgaggactggaagaagggggacaccttctcctgcatggtgggccacgaggccctgc
cgctggccttcacacagaagaccatcgaccgcttggcgggtaaacccacccatgtcaatgtgtctgttgtcatggcggaggtggacg
cggatccttcgaacaacctgctcccatcctgggccattaccttaatctcagtaaatggaatttttgtgatatgctgcctgacctactgcttt
gccccaagatgcagagagagaaggaggaatgagagattgagaagggaaagtgtacgccctgtataaatcgatac
AA
5B9-IgAH IgA-T4-CD80 (amino acid sequence)
MRFSAQLLGLLVLWIPGSTADIVMTQAAFSNPVTLGTSASISCRSSKSLLHSNGITYL
YWYLQKPGQSPQLLIYQMSNLASGVPDRFSSSGSGTDFTLRISRVEAEDVGVYYCA
QNLELPLTFGAGTKLELKRGGGGSGGGGSGGGGSSQVQLKQSGPGLVQSSQSLSIT
CTVSGFSLTTYAVHWVRQSPGKGLEWLGVIWSGGITDYNAAFISRLSITKDDSKSQV
FFKMNSLQPNDTAIYYCARNGGDNYPYYYAMDYWGQGTSVTVSSDQPVPSTPPTP
SPSTPPTPSPSCCHPRLSLHRPALEDLLLGSEAILTCTLTGLRDASGVTFTWTPSSGKS
AVQGPPDRDLCGCYSVSSVLPGCAEPWNHGKTFTCTAAYPESKTPLTATLSKSGNT

[0857]

```
FRPEVHLLPPPSEELALNELVTLTCLARGFSPKDVLVRWLQGSQELPREKYLTWASR
QEPSQGTTTFAVTSILRVAAEDWKKGDTFSCMVGHEALPLAFTQKTIDRLAGKPTH
VNVSVVMAEVDADPSNNLLPSWAITLISVNGIFVICCLTYCFAPRCRERRRNERLRR
ESVRPV
NT
5B9-scFv-human IgE Fc (CH2—CH3—CH4)-CD80 (nucleotide sequence)
aagcttgccgccatgaggttctctgctcagcttctggggctgcttgtgctctggatccctggatccactgcagatattgtgatgacgcag
gctgcattctccaatccagtcactcttggaacatcagcttccatctcctgcaggtctagtaagagtctcctacatagtaatggcatcactta
tttgtattggtatctgcagaagccaggccagtctcctcagctcctgatttatcagatgtccaaccttgcctcaggagtcccagacaggttc
agtagcagtgggtcaggaactgatttcacactgagaatcagcagagtggaggctgaggatgtgggtgtttattactgtgctcaaaatct
agaacttccgctcacgttcggtgctgggaccaagctggagctgaaacggggtggcggtggctcgggcggtggtgggtcgggtgg
cggcggatcgtcacaggtgcagctgaagcagtcaggacctggcctagtgcagtcctcacagagcctgtccatcacctgcacagtct
ctggtttctcattaactacctatgctgtacactgggttcgccagtctccaggaaagggtctggagtggctgggagtgatatggagtggt
ggaatcacagactataatgcagctttcatatccagactgagcatcaccaaggacgattccaagagccaagttttctttaaaatgaacagt
ctgcaacctaatgacacagccatttattactgtgccagaaatgggggtgataactacccttattactatgctatggactactggggtcaa
ggaacctcagtcaccgtctcctctgatcacgtctgctccagggacttcaccccgcccaccgtgaagatcttacagtcgtcctgcgacg
gcggcgggcacttccccccgaccatccagctcctgtgcctcgtctctgggtacaccccagggactatcaacatcacctggctggag
gacgggcaggtcatggacgtggacttgtccaccgcctctaccacgcaggagggtgagctggcctccacacaaagcgagctcaccc
tcagccagaagcactggctgtcagaccgcacctacacctgccaggtcacctatcaaggtcacacctttgaggacagcaccaagaag
tgtgcagattccaacccgagaggggtgagcgcctacctaagccggcccagcccgttcgacctgttcatccgcaagtcgcccacgat
cacctgtctggtggtggacctggcacccagcaaggggaccgtgaacctgacctggtcccgggccagtgggaagcctgtgaaccac
tccaccagaaaggaggagaagcagcgcaatggcacgttaaccgtcacgtccaccctgccggtgggcacccgagactggatcgag
ggggagacctaccagtgcagggtgacccacccccacctgcccagggccctcatgcggtccacgaccaagaccagcggcccgcg
tgctgccccggaagtctatgcgtttgcgacgccggagtggccggggagccgggacaagcgcaccctcgcctgcctgatccagaac
ttcatgcctgaggacatctcggtgcagtggctgcacaacgaggtgcagctcccggacgcccggcacagcacgacgcagccccgc
aagaccaagggctccggcttcttcgtcttcagccgcctggaggtgaccagggccgaatgggagcagaaagatgagttcatctgccg
tgcagtccatgaggcagcgagcccctcacagaccgtccagcgagcggtgtctgtaaatcccggtaaagcggatccttcgaagctcc
catcctgggccattaccttaatctcagtaaatggaatttttgtgatatgctgcctgacctactgctttgccccaagatgcagagagagaag
gaggaatgagagattgagaagggaaagtgtacgccctgtataaatcgata
AA
5B9-scFv-human IgE Fc (CH2—CH3—CH4)-CD80 (amino acid sequence)
[sequence omitted]
NT
2e12-scFv-IgAH IgA-T4-CD80 (nucleotide sequence)
aagcttatggattttcaagtgcagattttcagcttcctgctaatcagtgcttcagtcataatgtccagaggagtcgacattgtgctcaccca
atctccagcttctttggctgtgtctctaggtcagagagccaccatctcctgcagagccagtgaaagtgttgaatattatgtcacaagttta
atgcagtggtaccaacagaaaccaggacagccacccaaactcctcatctctgctgcatccaacgtagaatctggggtccctgccagg
tttagtggcagtgggtctgggacagacttcagcctcaacatccatcctgtggaggaggatgatattgcaatgtatttctgtcagcaaagt
aggaaggttccttggacgttcggggaggcaccaagctggaaatcaaacggggtggcggtggctcgggcggaggtgggtcgggt
ggcggcggatctcaggtgcagctgaaggagtcaggacctggcctggtggcgccctcacagagcctgtccatcacatgcaccgtct
cagggttctcattaaccggctatggtgtaaactgggttcgccagcctccaggaaagggtctggagtggctgggaatgatatggggtg
atggaagcacagactataattcagctctcaaatccagactgagcatcaccaaggacaactccaagagccaagttttcttaaaaatgaa
cagtctgcaaactgatgacacagccagatactactgtgccagagatggttatagtaactttcattactatgttatggactactggggtcaa
ggaacctcagtcaccgtctcctcagatcagccagttccctcaactccacctaccccatctccctcaactccacctaccccatctccctca
tgctgccacccccgactgtcactgcaccgaccggccctcgaggacctgctcttaggttcagaagcgatcctcacgtgcacactgacc
ggcctgagagatgcctcaggtgtcaccttcacctggacgccctcaagtgggaagagcgctgttcaaggaccacctgaccgtgacct
ctgtggctgctacagcgtgtccagtgtcctgccgggctgtgccgagccatggaaccatgggaagaccttcacttgcactgctgcctac
cccgagtccaagaccccgctaaccgccaccctctcaaaatccggaaacacattccggcccgaggtccacctgctgccgccgccgt
cggaggagctggccctgaacgagctggtgacgctgacgtgcctggcacgtggcttcagccccaaggatgtgctggttcgctggct
gcaggggtcacaggagctgccccgcgagaagtacctgacttgggcatcccggcaggagcccagccagggcaccaccaccttcg
ctgtgaccagcatactgcgcgtggcagccgaggactggaagaagggggacaccttctcctgcatggtgggccacgaggccctgc
cgctggccttcacacagaagaccatcgaccgcttggcgggtaaacccacccatgtcaatgtgtctgttgtcatggcggaggtggacg
cggatccttcgaacaacctgctcccatcctgggccattaccttaatctcagtaaatggaatttttgtgatatgctgcctgacctactgcttt
gccccaagatgcagagagagaaggaggaatgagagattgagaagggaaagtgtacgccctgtataaatcgatac
AA
2e12-scFv-IgAH IgA-T4-CD80 (amino acid sequence)
MDFQVQIFSFLLISASVIMSRGVDIVLTQSPASLAVSLGQRATISCRASESVEYYVTSL
MQWYQQKPGQPPKLLISAASNVESGVPARFSGSGSGTDFSLNIHPVEEDDIAMYFCQ
QSRKVPWTFGGGTKLEIKRGGGGSGGGGSGGGGSQVQLKESGPGLVAPSQSLSITC
TVSGFSLTGYGVNWVRQPPGKGLEWLGMIWGDGSTDYNSALKSRLSITKDNSKSQ
VFLKMNSLQTDDTARYYCARDGYSNFHYYVMDYWGQGTSVTVSSDQPVPSTPPTP
SPSTPPTPSPSCCHPRLSLHRPALEDLLLGSEAILTCTLTGLRDASGVTFTWTPSSGKS
AVQGPPDRDLCGCYSVSSVLPGCAEPWNHGKTFTCTAAYPESKTPLTATLSKSGNT
FRPEVHLLPPPSEELALNELVTLTCLARGFSPKDVLVRWLQGSQELPREKYLTWASR
QEPSQGTTTFAVTSILRVAAEDWKKGDTFSCMVGHEALPLAFTQKTIDRLAGKPTH
VNVSVVMAEVDADPSNNLLPSWAITLISVNGIFVICCLTYCFAPRCRERRRNERLRR
ESVRPV
NT
2e12-scFv-human IgE Fc (CH2—CH3—CH4)-CD80 (nucleotide sequence)
aagcttatggattttcaagtgcagattttcagcttcctgctaatcagtgcttcagtcataatgtccagaggagtcgacattgtgctcaccca
atctccagcttctttggctgtgtctctaggtcagagagccaccatctcctgcagagccagtgaaagtgttgaatattatgtcacaagttta
atgcagtggtaccaacagaaaccaggacagccacccaaactcctcatctctgctgcatccaacgtagaatctggggtccctgccagg
tttagtggcagtgggtctgggacagacttcagcctcaacatccatcctgtggaggaggatgatattgcaatgtatttctgtcagcaaagt
aggaaggttccttggacgttcggtggaggcaccaagctggaaatcaaacggggtggcggtggctcgggcggaggtgggtcgggt
ggcggcggatctcaggtgcagctgaaggagtcaggacctggcctggtggcgccctcacagagcctgtccatcacatgcaccgtct
cagggttctcattaaccggctatggtgtaaactgggttcgccagcctccaggaaagggtctggagtggctgggaatgatatggggtg
atggaagcacagactataattcagctctcaaatccagactgagcatcaccaaggacaactccaagagccaagttttcttaaaaatgaa
cagtctgcaaactgatgacacagccagatactactgtgccagagatggttatagtaactttcattactatgttatggactactggggtcaa
ggaacctcagtcaccgtctcctcagatcacgtctgctccagggacttcaccccgcccaccgtgaagatcttacagtcgtcctgcgacg
gcggcgggcacttccccccgaccatccagctcctgtgcctcgtctctgggtacaccccagggactatcaacatcacctggctggag
gacgggcaggtcatggacgtggacttgtccaccgcctctaccacgcaggagggtgagctggcctccacacaaagcgagctcaccc
tcagccagaagcactggctgtcagaccgcacctacacctgccaggtcacctatcaaggtcacacctttgaggacagcaccaagaag
tgtgcagattccaacccgagaggggtgagcgcctacctaagccggcccagcccgttcgacctgttcatccgcaagtcgcccacgat
cacctgtctggtggtggacctggcacccagcaaggggaccgtgaacctgacctggtcccgggccagtgggaagcctgtgaaccac
tccaccagaaaggaggagaagcagcgcaatggcacgttaaccgtcacgtccaccctgccggtgggcacccgagactggatcgag
ggggagacctaccagtgcagggtgacccacccccacctgcccagggccctcatgcggtccacgaccaagaccagcggcccgcg
tgctgccccggaagtctatgcgtttgcgacgccggagtggccggggagccgggacaagcgcaccctcgcctgcctgatccagaac
ttcatgcctgaggacatctcggtgcagtggctgcacaacgaggtgcagctcccggacgcccggcacagcacgacgcagccccgc
aagaccaagggctccggcttcttcgtcttcagccgcctggaggtgaccagggccgaatgggagcagaaagatgagttcatctgccg
tgcagtccatgaggcagcgagcccctcacagaccgtccagcgagcggtgtctgtaaatcccggtaaagcggatccttcgaagctcc
catcctgggccattaccttaatctcagtaaatggaatttttgtgatatgctgcctgacctactgctttgccccaagatgcagagagagaag
gaggaatgagagattgagaagggaaagtgtacgccctgtataaatcgata
AA
2e12-scFv-human IgE Fc (CH2—CH3—CH4)-CD80 (amino acid sequence)
MDFQVQIFSFLLISASVIMSRGVDIVLTQSPASLAVSLGQRATISCRASESVEYYVTSL
MQWYQQKPGQPPKLLISAASNVESGVPARFSGSGSGTDFSLNIHPVEEDDIAMYFCQ
QSRKVPWTFGGGTKLEIKRGGGGSGGGGSGGGGSQVQLKESGPGLVAPSQSLSITC
TVSGFSLTGYGVNWVRQPPGKGLEWLGMIWGDGSTDYNSALKSRLSITKDNSKSQ
VFLKMNSLQTDDTARYYCARDGYSNFHYYVMDYWGQGTSVTVSSDHVCSRDFTP
PTVKILQSSCDGGGHFPPTIQLLCLVSGYTPGTINITWLEDGQVMDVDLSTASTTQEG
ELASTQSELTLSQKHWLSDRTYTCQVTYQGHTFEDSTKKCADSNPRGVSAYLSRPS
PFDLFIRKSPTITCLVVDLAPSKGTVNLTWSRASGKPVNHSTRKEEKQRNGTLTVTS
TLPVGTRDWIEGETYQCRVTHPHLPRALMRSTTKTSGPRAAPEVYAFATPEWPGSR
DKRTLACLIQNFMPEDISVQWLHNEVQLPDARHSTTQPRKTKGSGFFVFSRLEVTRA
EWEQKDEFICRAVHEAASPSQTVQRAVSVNPGKADPSKLPSWAITLISVNGIFVICCL
TYCFAPRCRERRRNERLRRESVRPV
NT
500A2 scFv (nucleotide sequence)
atgttgtatacatctcagctccttgggcttttactcttctggatttcagcctccagaagtgacatagtgctgactcagactccagccactct
gtctctaattcctggagaaagagtcacaatgacctgtaagaccagtcagaatattggcacaatcttacactggtatcaccaaaaaccaa
aggaggctccaagggctctcatcaagtatgcttcgcagtccattcctgggatcccctccagattcagtggcagtggttcggaaacaga
tttcactctcagcatcaataacctggagcctgatgatatcggaatttattactgtcaacaaagtagaagctggcctgtcacgttcggtcct
ggcaccaagctggagataaaacggggtggcggtggctcgggcggaggtgggtcgggtggcggcggatctcaggtcaagctgca
gcagtccggttctgaactagggaaacctggggcctcagtgaaactgtcctgcaagacttcaggctacatattcacagatcactatattt
cttgggtgaaacagaagcctggagaaagcctgcagtggataggaaatgtttatggtggaaatggtggtacaagctacaatcaaaaatt
ccagggcaaggccacactgactgtagataaaatctctagcacagcctacatggaactcagcagcctgacatctgaggattctgccat
ctattactgtgcaagaaggccggtagcgacgggccatgctatggactactggggtcaggggatccaagttaccgtctcctctgatc
AA
500A2 scFv (amino acid sequence)
MLYTSQLLGLLLFWISASRSDIVLTQTPATLSLIPGERVTMTCKTSQNIGTILHWYHQ
KPKEAPRALIKYASQSIPGIPSRFSGSGSETDFTLSINNLEPDDIGIYYCQQSRSWPVTF
GPGTKLEIKRGGGGSGGGGSGGGGSQVKLQQSGSELGKPGASVKLSCKTSGYIFTD
HYISWVKQKPGESLQWIGNVYGGNGGTSYNQKFQGKATLTVDKISSTAYMELSSLT
SEDSAIYYCARRPVATGHAMDYWGQGIQVTVSSD
NT
5′ oligo:
Name :hIgAbcl5
Sequence :GTTGTTGATCAGCCAGTTCCCTCAACTCCACCTACC
NT
3′ oligo:
Name :IgA3BB
GTTGTTTTCGAAGGATCCGCGTCCACCTCCGCCATGACAACAGA
NT
5′ oligo:
Name :IgGWT3
GTTGTTTTCGAAGGATCCGCTTTACCCGGAGACAGGGAGAGGCTCTT
NT
3′ oligo:
Name :hIgGWT5
GTTGTTAGATCTGGAGCCCAAATCTTGTGACAAAACTCACACATG
NT
5′ oligo:
Name :FADD5
Sequence
GTTGTGGATCCTTCGAACCCGTTCCTGGTGCTGCTGCACTCGGTGTCG
NT
3′ oligo:
Name :FADD3
Sequence
GTTGTTATCGATCTCGAGTTATCAGGACGCTTCGGAGGTAGATGCGTC
NT
FADD-CSSCFV (nucleotide sequence)
gtggatccttcgaacccgttcctggtgctgctgcactcggtgtcgtccagcctgtcgagcagcgagctgaccgagctcaagttcctat
gcctcgggcgcgtgggcaagcgcaagctggagcgcgtgcagagcggcctagacctcttctccatgctgctggagcagaacgacc
tggagcccgggcacaccgagctcctgcgcgagctgctcgcctccctgcggcgccacgacctgctgcggcgcgtcgacgacttcg
aggcgggggcggcggccggggccgcgcctggggaagaagacctgtgtgcagcatttaacgtcatatgtgataatgtggggaaag
attggagaaggctggctcgtcagctcaaagtctcagacaccaagatcgacagcatcgaggacagatacccccgcaacctgacaga
gcgtgtgcgggagtcactgagaatctggaagaacacagagaaggagaacgcaacagtggcccacctggtgggggctctcaggtc
ctgccagatgaacctggtggctgacctggtacaagaggttcagcaggcccgtgacctccagaacaggagtggggccatgtccccg
atgtcatggaactcagacgcatctacctccgaagcgtcctgataactcgagatcgataacaac
AA
FADD-CSSCFV (amino acid sequence)
VDPSNPFLVLLHSVSSSLSSSELTELKFLCLGRVGKRKLERVQSGLDLFSMLLEQND
LEPGHTELLRELLASLRRHDLLRRVDDFEAGAAAGAAPGEEDLCAAFNVICDNVGK
DWRRLARQLKVSDTKIDSIEDRYPRNLTERVRESLRIWKNTEKENATVAHLVGALR
SCQMNLVADLVQEVQQARDLQNRSGAMSPMSWNSDASTSEAS
NT
HCD28tm5B (nucleotide sequence)
GTTGTGGATCCTCCCTTTTGGGTGCTGGTGGTGGTTGGTGTCCTGGCTTGCTATA
GCTTG
NT
HCD28tm3S (nucleotide sequence)
GTTGTTTCGAACCCAGAAAATAATAAAGGCCACTGTTACTAGCAAGCTATAGCA
AGCCAG
NT
HCD28tm5′ (nucleotide sequence)
GTTGTGGATCCTCCCTTTTGGGTGCTGGTGGT
NT
HCD28tm3′ (nucleotide sequence)
GTTGTTTCGAACCCAGAAAATAATAAAGGCCAC
NT
HCD80tm5′ (nucleotide sequence)
GTTGTGGATCCTCCTGCTCCCATCCTGG
NT
HCD80tm3′ (nucleotide sequence)
GTTGTTTCGAACGGCAAAGCAGTAGGTCAGGC
NT
MFADD5BB (nucleotide sequence)
GTTGTGGATCCTTCGAACCCATTCCTGGTGCTGCTGCACTCGCTG
NT
MFADD3XC (nucleotide sequence)
GTTGTTATCGATCTCGAGTCAGGGTGTTTCTGAGGAAGACAC
NT
Murine FADD nucleotide sequence (full length, but without flanking -Ig or
transmembrane sequences) (nucleotide sequence)
gtggatccttcgaacatggacccattcctggtgctgctgcactcgctgtccggcagcctgtcgggcaacgatctgatggagctcaagt
tcttgtgccgcgagcgcgtgagcaaacgaaagctggagcgcgtgcagagtggcctggacctgttcacggtgctgctggagcagaa
cgacctggagcgcgggcacaccgggctgctgcgcgagttgctggcctcgctgcgccgacacgatctactgcagcgcctggacga
cttcgaggcggggacggcgaccgctgcgcccccgggggaggcagatctgcaggtggcatttgacattgtgtgtgacaatgtgggg
agagactggaaaagactggcccgcgagctgaaggtgtctgaggccaagatggatgggattgaggagaagtacccccgaagtctg
agtgagcgggtaagggagagtctgaaagtctggaagaatgctgagaagaagaacgcctcggtggccggactggtcaaggcgctg
cggacctgcaggctgaatctggtggctgacctggtggaagaagcccaggaatctgtgagcaagagtgagaatatgtccccagtact
aagggattcaactgtgtcttcctcagaaacaccctgactcgagatcgat
AA
Murine FADD (amino acid sequence)
VDPSNMDPFLVLLHSLSGSLSGNDLMELKFLCRERVSKRKLERVQSGLDLFTVLLE
QNDLERGHTGLLRELLASLRRHDLLQRLDDFEAGTATAAPPGEADLQVAFDIVCDN
VGRDWKRLARELKVSEAKMDGIEEKYPRSLSERVRESLKVWKNAEKKNASVAGL
VKALRTCRLNLVADLVEEAQESVSKSENMSPVLRDSTVSSSETP
NT
MCASP3-5 (nucleotide sequence)
GTTGTGGATCCTTCGAACATGGAGAACAACAAAACCTCAGTGGATTCA
NT
MCASP3-3 (nucleotide sequence)
GTTGTTATCGATCTCGAGCTAGTGATAAAAGTACAGTTCTTTCGT
NT
MCASP8-5 (nucleotide sequence)
GTTGTTTCGAACATGGATTTCCAGAGTTGTCTTTATGCTATTGCTG
NT
MCASP8-3 (nucleotide sequence)
GTTGTTATCGATCTCGAGTCATTAGGGAGGGAAGAAGAGCTTCTTCCG
NT
hcasp3-5 (nucleotide sequence)
GTTGTGGATCCTTCGAACATGGAGAACACTGAAAACTCAGTGGAT
NT
hcasp3-3 (nucleotide sequence)
GTTGTTATCGATCTCGAGTTAGTGATAAAAATAGAGTTCTTTTGTGAG
NT
hcasp8-5 (nucleotide sequence)
GTTGTGGATCCTTCGAACATGGACTTCAGCAGAAATCTTTATGAT
NT
hcasp8-3 (nucleotide sequence)
GTTGTTATCGATGCATGCTCAATCAGAAGGGAAGACAAGTTTTTTTCT
NT
HuIgGMHWC (nucleotide sequence)
gtt gtt gat cag gag ccc aaa tct tct gac aaa act cac aca tct cca ccg tcc cca gca cct gaa ctc ctg ggt
gga ccg tca gtc ttc c
NT
2H7-human IgE (CH2—CH3—CH4) (nucleotide sequence)
aagcttgccgccatggattttcaagtgcagattttcagcttcctgctaatcagtgcttcagtcataattgccagaggacaaattgttctctc
ccagtctccagcaatcctgtctgcatctccaggggagaaggtcacaatgacttgcagggccagctcaagtgtaagttacatgcactgg
taccagcagaagccaggatcctcccccaaaccctggatttatgccccatccaacctggcttctggagtccctgctcgcttcagtggca
gtgggtctgggacctcttactctctcacaatcagcagagtggaggctgaagatgctgccacttattactgccagcagtggagttttaac
ccacccacgttcggtgctgggaccaagctggagctgaaaggtggcggtggctcgggcggtggtggatctggaggaggtgggagc
tctcaggcttatctacagcagtctggggctgagctggtgaggcctggggcctcagtgaagatgtcctgcaaggcttctggctacacat
ttaccagttacaatatgcactgggtaaagcagacacctagacagggcctggaatggattggagctatttatccaggaaatggtgatact
tcctacaatcagaagttcaagggcaaggccacactgactgtagacaaatcctccagcacagcctacatgcagctcagcagcctgac
atctgaagactctgcggtctatttctgtgcaagagtggtgtactatagtaactcttactggtacttcgatgtctggggcacagggaccac
ggtcaccgtctctgatcacgtctgctccagggacttcaccccgcccaccgtgaagatcttacagtcgtcctgcgacggcggcgggca
cttccccccgaccatccagctcctgtgcctcgtctctgggtacaccccagggactatcaacatcacctggctggaggacgggcaggt
catggacgtggacttgtccaccgcctctaccacgcaggagggtgagctggcctccacacaaagcgagctcaccctcagccagaag
cactggctgtcagaccgcacctacacctgccaggtcacctatcaaggtcacacctttgaggacagcaccaagaagtgtgcagattcc
aacccgagaggggtgagcgcctacctaagccggcccagcccgttcgacctgttcatccgcaagtcgcccacgatcacctgtctggt
ggtggacctggcacccagcaaggggaccgtgaacctgacctggtcccgggccagtgggaagcctgtgaaccactccaccagaaa
ggaggagaagcagcgcaatggcacgttaaccgtcacgtccaccctgccggtgggcacccgagactggatcgagggggagacct
accagtgcagggtgacccacccccacctgcccagggccctcatgcggtccacgaccaagaccagcggcccgcgtgctgccccg
gaagtctatgcgtttgcgacgccggagtggccggggagccgggacaagcgcaccctcgcctgcctgatccagaacttcatgcctg
aggacatctcggtgcagtggctgcacaacgaggtgcagctcccggacgcccggcacagcacgacgcagccccgcaagaccaag
ggctccggcttcttcgtcttcagccgcctggaggtgaccagggccgaatgggagcagaaagatgagttcatctgccgtgcagtccat
gaggcagcgagcccctcacagaccgtccagcgagcggtgtctgtaaatcccggtaaatgataatctaga
AA
2H7 scFv IgE (CH2—CH3—CH4) (amino acid sequence)
MDFQVQIFSFLLISASVIIARGQIVLSQSPAILSASPGEKVTMTCRASSSVSYMHWYQ
QKPGSSPKPWIYAPSNLASGVPARFSGSGSGTSYSLTISRVEAEDAATYYCQQWSFN
PPTFGAGTKLELKGGGGSGGGGSGGGGSSQAYLQQSGAELVRPGASVKMSCKASG
YTFTSYNMHWVKQTPRQGLEWIGAIYPGNGDTSYNQKFKGKATLTVDKSSSTAYM
QLSSLTSEDSAVYFCARVVYYSNSYWYFDVWGTGTTVTVSDHVCSRDFTPPTVKIL
QSSCDGGGHFPPTIQLLCLVSGYTPGTINITWLEDGQVMDVDLSTASTTQEGELAST
QSELTLSQKHWLSDRTYTCQVTYQGHTFEDSTKKCADSNPRGVSAYLSRPSPFDLFI
RKSPTITCLVVDLAPSKGTVNLTWSRASGKPVNHSTRKEEKQRNGTLTVTSTLPVGT
RDWIEGETYQCRVTHPHLPRALMRSTTKTSGPRAAPEVYAFATPEWPGSRDKRTLA
CLIQNFMPEDISVQWLHNEVQLPDARHSTTQPRKTKGSGFFVFSRLEVTRAEWEQK
DEFICRAVHEAASPSQTVQRAVSVNPGK
NT
2H7 scFv MH (SSS) MCH2WTCH3 (nucleotide sequence)
aagcttgccgccatggattttcaagtgcagattttcagcttcctgctaatcagtgcttcagtcataattgccagaggacaaattgttctctc
ccagtctccagcaatcctgtctgcatctccaggggagaaggtcacaatgacttgcagggccagctcaagtgtaagttacatgcactgg
taccagcagaagccaggatcctcccccaaaccctggatttatgccccatccaacctggcttctggagtccctgctcgcttcagtggca
gtgggtctgggacctcttactctctcacaatcagcagagtggaggctgaagatgctgccacttattactgccagcagtggagttttaac
ccacccacgttcggtgctgggaccaagctggagctgaaagatggcggtggctcgggcggtggtggatctggaggaggtgggagc
tctcaggcttatctacagcagtctggggctgagctggtgaggcctggggcctcagtgaagatgtcctgcaaggcttctggctacacat
ttaccagttacaatatgcactgggtaaagcagacacctagacagggcctggaatggattggagctatttatccaggaaatggtgatact
tcctacaatcagaagttcaagggcaaggccacactgactgtagacaaatcctccagcacagcctacatgcagctcagcagcctgac
atctgaagactctgcggtctatttctgtgcaagagtggtgtactatagtaactcttactggtacttegatgtctggggcacagggaccac
ggtcaccgtctcttctgatcaggagcccaaatcttctgacaaaactcacacatccccaccgtccccagcacctgaactcctgggggga
tcgtcagtcttcctcttccccccaaaacccaaggacaccctcatgatctcccggacccctgaggtcacatgcgtggtggtggacgtga
gccacgaagaccctgaggtcaagttcaactggtacgtggacggcgtggaggtgcataatgccaagacaaagccgcgggaggagc
agtacaacagcacgtaccgtgtggtcagcgtcctcaccgtcctgcaccaggactggctgaatggcaaggagtacaagtgcaaggtc
tccaacaaagccctcccagcccccatcgagaaaacaatctccaaagccaaagggcagccccgagaaccacaggtgtacaccctg
cccccatcccgggatgagctgaccaagaaccaggtcagcctgacctgcctggtcaaaggcttctatcccagcgacatcgccgtgga
gtgggagagcaatgggcagccggagaacaactacaagaccacgcctcccgtgctggactccgacggctccttcttcctctacagca
agctcaccgtggacaagagcaggtggcagcaggggaacgtcttctcatgctccgtgatgcatgaggctctgcacaaccactacacg
cagaagagcctctccctgtctccgggtaaatgatctaga
AA
2H7 scFv MH (SSS) MCH2WTCH3 (amino acid sequence)
MDFQVQIFSFLLISASVIIARGQIVLSQSPAILSASPGEKVTMTCRASSSVSYMHWYQ
QKPGSSPKPWIYAPSNLASGVPARFSGSGSGTSYSLTISRVEAEDAATYYCQQWSFN
PPTFGAGTKLELKDGGGSGGGGSGGGGSSQAYLQQSGAELVRPGASVKMSCKASG
YTFTSYNMHWVKQTPRQGLEWIGAIYPGNGDTSYNQKFKGKATLTVDKSSSTAYM
QLSSLTSEDSAVYFCARVVYYSNSYWYFDVWGTGTTVTVSSDQEPKSSDKTHTSPP
SPAPELLGGSSVFLFPPKPKDTLMISRTPEVTCVVVDVSHEDPEVKFNWYVDGVEV
HNAKTKPREEQYNSTYRVVSVLTVLHQDWLNGKEYKCKVSNKALPAPIEKTISKA
KGQPREPQVYTLPPSRDELTKNQVSLTCLVKGFYPSDIAVEWESNGQPENNYKTTPP
VLDSDGSFFLYSKLTVDKSRWQQGNVFSCSVMHEALHNHYTQKSLSLSPGK
NT
5B9 scFv MTHWTCH2CH3 (nucleotide sequence)
aagcttgccgccatgaggttctctgctcagcttctggggctgcttgtgctctggatccctggatccactgcagatattgtgatgacgcag
gctgcattctccaatccagtcactcttggaacatcagcttccatctcctgcaggtctagtaagagtctcctacatagtaatggcatcactta
tttgtattggtatctgcagaagccaggccagtctcctcagctcctgatttatcagatgtccaaccttgcctcaggagtcccagacaggttc
agtagcagtgggtcaggaactgatttcacactgagaatcagcagagtggaggctgaggatgtgggtgtttattactgtgctcaaaatct
agaacttccgctcacgttcggtgctgggaccaagctggagctgaaacggggtggcggtggctcgggcggtggtgggtcgggtgg
cggcggatcgtcacaggtgcagctgaagcagtcaggacctggcctagtgcagtcctcacagagcctgtccatcacctgcacagtct
ctggtttctcattaactacctatgctgtacactgggttcgccagtctccaggaaagggtctggagtggctgggagtgatatggagtggt
ggaatcacagactataatgcagctttcatatccagactgagcatcaccaaggacgattccaagagccaagttttctttaaaatgaacagt
ctgcaacctaatgacacagccatttattactgtgccagaaatgggggtgataactacccttattactatgctatggactactggggtcaa
ggaacctcagtcaccgtctcctctgatcaggagcccaaatcttctgacaaaactcacacatccccaccgtccccagcacctgaactcc
tggggggaccgtcagtcttcctcttccccccaaaacccaaggacaccctcatgatctcccggacccctgaggtcacatgcgtggtgg
tggacgtgagccacgaagaccctgaggtcaagttcaactggtacgtggacggcgtggaggtgcataatgccaagacaaagccgcg
ggaggagcagtacaacagcacgtaccgtgtggtcagcgtcctcaccgtcctgcaccaggactggctgaatggcaaggagtacaag
tgcaaggtctccaacaaagccctcccagcccccatcgagaaaacaatctccaaagccaaagggcagccccgagaaccacaggtgt
acaccctgcccccatcccgggatgagctgaccaagaaccaggtcagcctgacctgcctggtcaaaggcttctatcccagcgacatc
gccgtggagtgggagagcaatgggcagccggagaacaactacaagaccacgcctcccgtgctggactccgacggctccttcttcc
tctacagcaagctcaccgtggacaagagcaggtggcagcaggggaacgtcttctcatgctccgtgatgcatgaggctctgcacaac
cactacacgcagaagagcctctccctgtctccgggtaaatgatctaga
AA
5B9 scFv MTHWTCH2CH3 (amino acid sequence)
MRFSAQLLGLLVLWIPGSTADIVMTQAAFSNPVTLGTSASISCRSSKSLLHSNGITYL
YWYLQKPGQSPQLLIYQMSNLASGVPDRFSSSGSGTDFTLRISRVEAEDVGVYYCA
QNLELPLTFGAGTKLELKRGGGGSGGGGSGGGGSSQVQLKQSGPGLVQSSQSLSIT
CTVSGFSLTTYAVHWVRQSPGKGLEWLGVIWSGGITDYNAAFISRLSITKDDSKSQV
FFKMNSLQPNDTAIYYCARNGGDNYPYYYAMDYWGQGTSVTVSSDQEPKSSDKT
HTSPPSPAPELLGGPSVFLFPPKPKDTLMISRTPEVTCVVVDVSHEDPEVKFNWYVD
GVEVHNAKTKPREEQYNSTYRVVSVLTVLHQDWLNGKEYKCKVSNKALPAPIEKT
ISKAKGQPREPQVYTLPPSRDELTKNQVSLTCLVKGFYPSDIAVEWESNGQPENNYK
TTPPVLDSDGSFFLYSKLTVDKSRWQQGNVFSCSVMHEALHNHYTQKSLSLSPGK
1. 2H7 scFv with alternative VHL11 mutations:
Nucleotide sequence
Aagcttgccgccatggattttcaagtgcagattttcagcttcctgctaatcagtgcttcagtcataattgccagaggacaaattgttctctc
ccagtctccagcaatcctgtctgcatctccaggggagaaggtcacaatgacttgcagggccagctcaagtgtaagttacatgcactgg
taccagcagaagccaggatcctcccccaaaccctggatttatgccccatccaacctggcttctggagtccctgctcgcttcagtggca
gtgggtctgggacctcttactctctcacaatcagcagagtggaggctgaagatgctgccacttattactgccagcagtggagttttaac
ccacccacgttcggtgctgggaccaagctggagctgaaagatggcggtggctcgggcggtggtggatctggaggaggtgggagc
tctcaggcttatctacagcagtctggggctgag (one of the following: tcn, acn, gan, can, aan, cgn, agn)
gtgaggcctggggcctcagtgaagatgtcctgcaaggcttctggctacacatttaccagttacaatatgcactgggtaaagcagacac
ctagacagggcctggaatggattggagctatttatccaggaaatggtgatacttcctacaatcagaagttcaagggcaaggccacact
gactgtagacaaatcctccagcacagcctacatgcagctcagcagcctgacatctgaagactctgcggtctatttctgtgcaagagtg
gtgtactatagtaactcttactggtacttcgatgtctggggcacagggaccacggtcaccgtctcttctgatcag
Amino acid sequence
mdfqvqifsfllisasviiargqivlsqspailsaspgekvtmtcrasssvsymhwyqqkpgsspkpwiyapsnlasgvparfsg
sgsgtsysltisrveaedaatyycqqwsfnpptfgagtklelkdgggsggggsggggssqaylqqsgae (one of the
following: s, t, d, e, q, n, r, k, h)
vrpgasvkmsckasgytftsynmhwvkqtprqglewigaiypgngdtsynqkfkgkatltvdkssstaymqlssltsedsavy
fcarvvyysnsywyfdvwgtgttvtvssdq
2. VHL11 deletion
Nucleotide sequence:
Aagcttgccgccatggattttcaagtgcagattttcagcttcctgctaatcagtgcttcagtcataattgccagaggacaaattgttctctc
ccagtctccagcaatcctgtctgcatctccaggggagaaggtcacaatgacttgcagggccagctcaagtgtaagttacatgcactgg
taccagcagaagccaggatcctcccccaaaccctggatttatgccccatccaacctggcttctggagtccctgctcgcttcagtggca
gtgggtctgggacctcttactctctcacaatcagcagagtggaggctgaagatgctgccacttattactgccagcagtggagttttaac
ccacccacgttcggtgctgggaccaagctggagctgaaagatggcggtggctcgggcggtggtggatctggaggaggtgggagc
tctcaggcttatctacagcagtctggggctgaggtgaggcctggggcctcagtgaagatgtcctgcaaggcttctggctacacattta
ccagttacaatatgcactgggtaaagcagacacctagacagggcctggaatggattggagctatttatccaggaaatggtgatacttc
ctacaatcagaagttcaagggcaaggccacactgactgtagacaaatcctccagcacagcctacatgcagctcagcagcctgacat
ctgaagactctgcggtctatttctgtgcaagagggtgtactatagtaactcttactggtacttcgatgtctggggcacagggaccacgg
tcaccgtctcttctgatcag
Amino acid sequence:
mdfqvqifsfllisasviiargqivlsqspailsaspgekvtmtcrasssvsymhwyqqkpgsspkpwiyapsnlasgvparfsg
sgsgtsysltisrveaedaatyycqqwsfnpptfgagtklelkdgggsggggsggggssqaylqqsgaevrpgasvkmsckas
gytftsynmhwvkqtprqglewigaiypgngdtsynqkfkgkatltvdkssstaymqlssltsedsavyfcarvvyysnsywy
fdvwgtgttvtvssdq
3. 2H7 VL L106 with alternative mutations
Nucleotide sequence:
aagcttgccgccatggattttcaagtgcagattttcagcttcctgctaatcagtgcttcagtcataattgccagaggacaaattgttctctc
ccagtctccagcaatcctgtctgcatctccaggggagaaggtcacaatgacttgcagggccagctcaagtgtaagttacatgcactgg
taccagcagaagccaggatcctcccccaaaccctggatttatgccccatccaacctggcttctggagtccctgctcgcttcagtggca
gtgggtctgggacctcttactctctcacaatcagcagagtggaggctgaagatgctgccacttattactgccagcagtggagttttaac
ccacccacgttcggtgctgggaccaagctggag (tcn, agn, aan, cgn, can, gan, and non-natural
derivatives of these codons) aaagatggcggtggctcgggcggtggtggatctggaggaggtgggagctc
Amino acid sequence:
Mdfqvqifsfllisasviiargqivlsqspailsaspgekvtmtcrasssvsymhwyqqkpgsspkpwiyapsnlasgvparfs
gsgsgtsysltisrveaedaatyycqqwsfnpptfgagtkle (s, t, r, k, h, q, n, d, e, and non-natural
derivatives of these amino acids at position 106) kdgggsggggsggggss
4. YL L106 deletion
Nucleotide sequence:
Aagcttgccgccatggattttcaagtgcagattttcagcttcctgctaatcagtgcttcagtcataattgccagaggacaaattgttctctc
ccagtctccagcaatcctgtctgcatctccaggggagaaggtcacaatgacttgcagggccagctcaagtgtaagttacatgcactgg
taccagcagaagccaggatcctcccccaaaccctggatttatgccccatccaacctggcttctggagtccctgctcgcttcagtggca
gtgggtctgggacctcttactctctcacaatcagcagagtggaggctgaagatgctgccacttattactgccagcagtggagttttaac
ccacccacgttcggtgctgggaccaagctggagaaagatggcggtggctcgggcggtggtggatctggaggaggtgggagctc
Amino acid sequence:
mdfqvqifsfllisasviiargqivlsqspailsaspgekvtmtcrasssvsymhwyqqkpgsspkpwiyapsnlasgvparfsg
sgsgtsysltisrveaedaatyycqqwsfnpptfgagtklekdgggsggggsggggss
5. IgE CH3 CH4
Nucleotide sequence:
tccaacccgagaggggtgagcgcctacctaagccggcccagcccgttcgacctgttcatccgcaagtcgcccacgatcacctgtct
ggtggtggacctggcacccagcaaggggaccgtgaacctgacctggtcccgggccagtgggaagcctgtgaaccactccaccag
aaaggaggagaagcagcgcaatggcacgttaaccgtcacgtccaccctgccggtgggcacccgagactggatcgagggggaga
cctaccagtgcagggtgacccacccccacctgcccagggccctcatgcggtccacgaccaagaccagcggcccgcgtgctgccc
cggaagtctatgcgtttgcgacgccggagtggccggggagccgggacaagcgcaccctcgcctgcctgatccagaacttcatgcc
tgaggacatctcggtgcagtggctgcacaacgaggtgcagctcccggacgcccggcacagcacgacgcagccccgcaagacca
agggctccggcttcttcgtcttcagccgcctggaggtgaccagggccgaatgggagcagaaagatgagttcatctgccgtgcagtc
catgaggcagcgagcccctcacagaccgtccagcgagcggtgtctgtaaatcccggtaaatgataatctagaa
Amino acid sequence:
snprgvsaylsrpspfdlfirksptitclvvdlapskgtvnltwsrasgkpvnhstrkeekqrngtltvtstlpvgtrdwiegetyqcr
vthphlpralmrsttktsgpraapevyafatpewpgsrdkrtlacliqnfmpedisvqwlhnevqlpdarhsttqprktkgsgffv
fsrlevtraeweqkdeficravheaaspsqtvqravsvnpgk
6. hIgG1H/IgE WCH3 WCH4
Nucleotide sequence:
tgatcaggagcccaaatcttctgacaaaactcacacatccccaccgtccccagcatccaacccgagaggggtgagcgcctacctaa
gccggcccagcccgttcgacctgttcatccgcaagtcgcccacgatcacctgtctggtggtggacctggcacccagcaaggggac
cgtgaacctgacctggtcccgggccagtgggaagcctgtgaaccactccaccagaaaggaggagaagcagcgcaatggcacgtt
aaccgtcacgtccaccctgccggtgggcacccgagactggatcgagggggagacctaccagtgcagggtgacccacccccacct
gcccagggccctcatgcggtccacgaccaagaccagcggcccgcgtgctgccccggaagtctatgcgtttgcgacgccggagtg
gccggggagccgggacaagcgcaccctcgcctgcctgatccagaacttcatgcctgaggacatctcggtgcagtggctgcacaac
gaggtgcagctcccggacgcccggcacagcacgacgcagccccgcaagaccaagggctccggcttcttcgtcttcagccgcctg
gaggtgaccagggccgaatgggagcagaaagatgagttcatctgccgtgcagtccatgaggcagcgagcccctcacagaccgtc
cagcgagcggtgtctgtaaatcccggtaaatgataatctagaa
Amino acid sequence:
dqepkssdkthtsppspasnprgvsaylsrpspfdlfirksptitclvvdlapskgtvnltwsrasgkpvnhstrkeekqrngtltvt
stlpvgtrdwiegetyqcrvthphlpralmrsttktsgpraapevyafatpewpgsrdkrtlacliqnfmpedisvqwlhnevqlp
darhsttqprktkgsgffvfsrlevtraeweqkdeficravheaaspsqtvqravsvnpgk
7. IgE WCH2 WCH3 WCH4
Nucleotide sequence:
Tgatcacgtctgctccagggacttcaccccgcccaccgtgaagatcttacagtcgtcctgcgacggcggcgggcacttccccccga
ccatccagctcctgtgcctcgtctctgggtacaccccagggactatcaacatcacctggctggaggacgggcaggtcatggacgtg
gacttgtccaccgcctctaccacgcaggagggtgagctggcctccacacaaagcgagctcaccctcagccagaagcactggctgt
cagaccgcacctacacctgccaggtcacctatcaaggtcacacctttgaggacagcaccaagaagtgtgcagattccaacccgaga
ggggtgagcgcctacctaagccggcccagcccgttcgacctgttcatccgcaagtcgcccacgatcacctgtctggtggtggacct
ggcacccagcaaggggaccgtgaacctgacctggtcccgggccagtgggaagcctgtgaaccactccaccagaaaggaggaga
agcagcgcaatggcacgttaaccgtcacgtccaccctgccggtgggcacccgagactggatcgagggggagacctaccagtgca
gggtgacccacccccacctgcccagggccctcatgcggtccacgaccaagaccagcggcccgcgtgctgccccggaagtctatg
cgtttgcgacgccggagtggccggggagccgggacaagcgcaccctcgcctgcctgatccagaacttcatgcctgaggacatctc
ggtgcagtggctgcacaacgaggtgcagctcccggacgcccggcacagcacgacgcagccccgcaagaccaagggctccggc
ttcttcgtcttcagccgcctggaggtgaccagggccgaatgggagcagaaagatgagttcatctgccgtgcagtccatgaggcagc
gagcccctcacagaccgtccagcgagcggtgtctgtaaatcccggtaaatgataatctaga
Amino acid sequence:
dhvcsrdftpptvkilqsscdggghfpptiqllclvsgytpgtinitwledgqvmdvdlstasttqegelastqseltlsqkhwlsdrt
ytcqvtyqghtfedstkkcadsnprgvsaylsrpspfdlfirksptitclvvdlapskgtvnltwsrasgkpvnhstrkeekqrngtl
tvtstlpvgtrdwiegetyqcrvthphlpralmrsttktsgpraapevyafatpewpgsrdkrtlacliqnfmpedisvqwlhnev
qlpdarhsttqprktkgsgffvfsrlevtraeweqkdeficravheaaspsqtvqravsvnpgk
8. hIgG1H/IgE CH3 CH4 (ORF)
Nucleotide sequence:
Nucleotide sequence:
tgatcaggagcccaaatcttctgacaaaactcacacatccccaccgtccccagcatccaacccgagaggggtgagcgcctacctaa
gccggcccagcccgttcgacctgttcatccgcaagtcgcccacgatcacctgtctggtggtggacctggcacccagcaaggggac
cgtgaacctgacctggtcccgggccagtgggaagcctgtgaaccactccaccagaaaggaggagaagcagcgcaatggcacgtt
aaccgtcacgtccaccctgccggtgggcacccgagactggatcgagggggagacctaccagtgcagggtgacccacccccacct
gcccagggccctcatgcggtccacgaccaagaccagcggcccgcgtgctgccccggaagtctatgcgtttgcgacgccggagtg
gccggggagccgggacaagcgcaccctcgcctgcctgatccagaacttcatgcctgaggacatctcggtgcagtggctgcacaac
gaggtgcagctcccggacgcccggcacagcacgacgcagccccgcaagaccaagggctccggcttcttcgtcttcagccgcctg
gaggtgaccagggccgaatgggagcagaaagatgagttcatctgccgtgcagtccatgaggcagcgagcccctcacagaccgtc
cagcgagcggtgtctgtaaatcccggtaaagcggatccttcgaa
Amino acid sequence:
dqepkssdkthtsppspasnprgvsaylsrpspfdlfirksptitclvvdlapskgtvnltwsrasgkpvnhstrkeekqrngtltvt
stlpvgtrdwiegetyqcrvthphlpralmrsttktsgpraapevyafatpewpgsrdkrtlacliqnfmpedisvqwlhnevqlp
darhsttqprktkgsgffvfsrlevtraeweqkdeficravheaaspsqtvqravsvnpgksgsfe
9. 2H7 VHL11S scFv hIgG1(SSS-S)H hIgE WCH3 WCH4
Nucleotide sequence:
aagcttgccgccatggattttcaagtgcagattttcagcttcctgctaatcagtgcttcagtcataattgccagaggacaaattgttctctc
ccagtctccagcaatcctgtctgcatctccaggggagaaggtcacaatgacttgcagggccagctcaagtgtaagttacatgcactgg
taccagcagaagccaggatcctcccccaaaccctggatttatgccccatccaacctggcttctggagtccctgctcgcttcagtggca
gtgggtctgggacctcttactctctcacaatcagcagagtggaggctgaagatgctgccacttattactgccagcagtggagttttaac
ccacccacgttcggtgctgggaccaagctggagctgaaagatggcggtggctcgggcggtggtggatctggaggaggtgggagc
tctcaggcttatctacagcagtctggggctgagtcggtgaggcctggggcctcagtgaagatgtcctgcaaggcttctggctacacat
ttaccagttacaatatgcactgggtaaagcagacacctagacagggcctggaatggattggagctatttatccaggaaatggtgatact
tcctacaatcagaagttcaagggcaaggccacactgactgtagacaaatcctccagcacagcctacatgcagctcagcagcctgac
atctgaagactctgcggtctatttctgtgcaagagtggtgtactatagtaactcttactggtacttcgatgtctggggcacagggaccac
ggtcaccgtctcttctgatcaggagcccaaatcttctgacaaaactcacacatccccaccgtcctcagcatccaacccgagaggggt
gagcgcctacctaagccggcccagcccgttcgacctgttcatccgcaagtcgcccacgatcacctgtctggtggtggacctggcac
ccagcaaggggaccgtgaacctgacctggtcccgggccagtgggaagcctgtgaaccactccaccagaaaggaggagaagcag
cgcaatggcacgttaaccgtcacgtccaccctgccggtgggcacccgagactggatcgagggggagacctaccagtgcagggtg
acccacccccacctgcccagggccctcatgcggtccacgaccaagaccagcggcccgcgtgctgccccggaagtctatgcgtttg
cgacgccggagtggccggggagccgggacaagcgcaccctcgcctgcctgatccagaacttcatgcctgaggacatctcggtgc
agtggctgcacaacgaggtgcagctcccggacgcccggcacagcacgacgcagccccgcaagaccaagggctccggcttcttc
gtcttcagccgcctggaggtgaccagggccgaatgggagcagaaagatgagttcatctgccgtgcagtccatgaggcagcgagcc
cctcacagaccgtccagcgagcggtgtctgtaaatcccggtaaatgataatctaga
Amino acid sequence:
Mdfqvqifsfllisasviiargqivlsqspailsaspgekvtmtcrasssvsymhwyqqkpgsspkpwiyapsnlasgvparfs
gsgsgtsysltisrveaedaatyycqqwsfnpptfgagtklelkdgggsggggsggggssqaylqqsgaesvrpgasvkmsck
asgytftsynmhwvkqtprqglewigaiypgngdtsynqkfkgkatltvdkssstaymqlssltsedsavyfcarvvyysnsy
wyfdvwgtgttvtvssdqepkssdkthtsppssasnprgvsaylsrpspfdlfirksptitclvvdlapskgtvnltwsrasgkpv
nhstrkeekqrngtltvtstlpvgtrdwiegetyqcrvthphlpralmrsttktsgpraapevyafatpewpgsrdkrtlacliqnfm
pedisvqwlhnevqlpdarhsttqprktkgsgffvfsrlevtraeweqkdeficravheaaspsqtvqravsvnpgk
10. 2H7 VHL11S scFv hIgG1(SSS-P)H hIgE WCH3 WCH4
Nucleotide sequence:
aagcttgccgccatggattttcaagtgcagattttcagcttcctgctaatcagtgcttcagtcataattgccagaggacaaattgttctctc
ccagtctccagcaatcctgtctgcatctccaggggagaaggtcacaatgacttgcagggccagctcaagtgtaagttacatgcactgg
taccagcagaagccaggatcctcccccaaaccctggatttatgccccatccaacctggcttctggagtccctgctcgcttcagtggca
gtgggtctgggacctcttactctctcacaatcagcagagtggaggctgaagatgctgccacttattactgccagcagtggagttttaac
ccacccacgttcggtgctgggaccaagctggagctgaaagatggcggtggctcgggcggtggtggatctggaggaggtgggagc
tctcaggcttatctacagcagtctggggctgagtcggtgaggcctggggcctcagtgaagatgtcctgcaaggcttctggctacacat
ttaccagttacaatatgcactgggtaaagcagacacctagacagggcctggaatggattggagctatttatccaggaaatggtgatact
tcctacaatcagaagttcaagggcaaggccacactgactgtagacaaatcctccagcacagcctacatgcagctcagcagcctgac
atctgaagactctgcggtctatttctgtgcaagagtggtgtactatagtaactcttactggtacttcgatgtctggggcacagggaccac
ggtcaccgtctcttctgatcaggagcccaaatcttctgacaaaactcacacatccccaccgtccccagcatccaacccgagaggggt
gagcgcctacctaagccggcccagcccgttcgacctgttcatccgcaagtcgcccacgatcacctgtctggtggtggacctggcac
ccagcaaggggaccgtgaacctgacctggtcccgggccagtgggaagcctgtgaaccactccaccagaaaggaggagaagcag
cgcaatggcacgttaaccgtcacgtccaccctgccggtgggcacccgagactggatcgagggggagacctaccagtgcagggtg
acccacccccacctgcccagggccctcatgcggtccacgaccaagaccagcggcccgcgtgctgccccggaagtctatgcgtttg
cgacgccggagtggccggggagccgggacaagcgcaccctcgcctgcctgatccagaacttcatgcctgaggacatctcggtgc
agtggctgcacaacgaggtgcagctcccggacgcccggcacagcacgacgcagccccgcaagaccaagggctccggcttcttc
gtcttcagccgcctggaggtgaccagggccgaatgggagcagaaagatgagttcatctgccgtgcagtccatgaggcagcgagcc
cctcacagaccgtccagcgagcggtgtctgtaaatcccggtaaatgataatctaga
Amino acid sequence:
mdfqvqifsfllisasviiargqivlsqspailsaspgekvtmtcrasssvsymhwyqqkpgsspkpwiyapsnlasgvparfsg
sgsgtsyslisrveaedaatyycqqwsfnpptfgagtklelkdgggsggggsggggssqaylqqsgaesvrpgasvkmsckas
gytftsynmhwvkqtprqglewigaiypgngdtsynqkfkgkatltvdkssstaymqlssltsedsavyfcarvvyysnsywy
fdvwgtgttvtvssdqepkssdkthtsppspasnprgvsaylsrpspfdlfirksptitclvvdlapskgtvnltwsrasgkpvnhs
trkeekqrngtltvtstlpvgtrdwiegetyqcrvthphlpralmrsttktsgpraapevyafatpewpgsrdkrtlacliqnfmpe
disvqwlhnevqlpdarhsttqprktkgsgffvfsrlevtraeweqkdeficravheaaspsqtvqravsvnpgk
10. 2H7 VL L106S
aagcttgccgccatggattttcaagtgcagattttcagcttcctgctaatcagtgcttcagtcataattgccagaggacaaattgttctctc
ccagtctccagcaatcctgtctgcatctccaggggagaaggtcacaatgacttgcagggccagctcaagtgtaagttacatgcactgg
taccagcagaagccaggatcctcccccaaaccctggatttatgccccatccaacctggcttctggagtccctgctcgcttcagtggca
gtgggtctgggacctcttactctctcacaatcagcagagtggaggctgaagatgctgccacttattactgccagcagtggagttttaac
ccacccacgttcggtgctgggaccaagctggagctgaaagatggcggtggctcgggcggtggtggatctggaggaggtgggagc
tc
Amino acid sequence:
mdfqvqifsfllisasviiargqivlsqspailsaspgekvtmtcrasssvsymhwyqqkpgsspkpwiyapsnlasgvparfsg
sgsgtsysltisrveaedaatyycqqwsfnpptfgagtkleskdgggsggggsggggss
11. 2H7 VL L106S scFv
Nucleotide sequence:
aagcttgccgccatggattttcaagtgcagattttcagcttcctgctaatcagtgcttcagtcataattgccagaggacaaattgttctctc
ccagtctccagcaatcctgtctgcatctccaggggagaaggtcacaatgacttgcagggccagctcaagtgtaagttacatgcactgg
taccagcagaagccaggatcctcccccaaaccctggatttatgccccatccaacctggcttctggagtccctgctcgcttcagtggca
gtgggtctgggacctcttactctctcacaatcagcagagtggaggctgaagatgctgccacttattactgccagcagtggagttttaac
ccacccacgttcggtgctgggaccaagctggagtctaaagatggcggtggctcgggcggtggtggatctggaggaggtgggagc
tctcaggcttatctacagcagtctggggctgagctggtgaggcctggggcctcagtgaagatgtcctgcaaggcttctggctacacat
ttaccagttacaatatgcactgggtaaagcagacacctagacagggcctggaatggattggagctatttatccaggaaatggtgatact
tcctacaatcagaagttcaagggcaaggccacactgactgtagacaaatcctccagcacagcctacatgcagctcagcagcctgac
atctgaagactctgcggtctatttctgtgcaagagtggtgtactatagtaactcttactggtacttcgatgtctggggcacagggaccac
ggtcaccgtctcttctgatcag
Amino acid sequence:
mdfqvqifsfllisasviiargqivlsqspailsaspgekvtmtcrasssvsymhwyqqkpgsspkpwiyapsnlasgvparfsg
sgsgtsysltisrveaedaatyycqqwsfnpptfgagtkleskdgggsggggsggggssqaylqqsgaelvrpgasvkmsckas
gytftsynmhwvkqtprqglewigaiypgngdtsynqkfkgkatltvdkssstaymqlssltsedsavyfcarvvyysnsywy
fdvwgtgttvtvssdq
12. 2H7 scFv VL L106S VHL11S scFv
Nucleotide sequence:
Aagcttgccgccatggattttcaagtgcagattttcagcttcctgctaatcagtgcttcagtcataattgccagaggacaaattgttctctc
ccagtctccagcaatcctgtctgcatctccaggggagaaggtcacaatgacttgcagggccagctcaagtgtaagttacatgcactgg
taccagcagaagccaggatcctcccccaaaccctggatttatgccccatccaacctggcttctggagtccctgctcgcttcagtggca
gtgggtctgggacctcttactctctcacaatcagcagagtggaggctgaagatgctgccacttattactgccagcagtggagttttaac
ccacccacgttcggtgctgggaccaagctggagtctaaagatggcggtggctcgggcggtggtggatctggaggaggtgggagc
tctcaggcttatctacagcagtctggggctgagtcggtgaggcctggggcctcagtgaagatgtcctgcaaggcttctggctacacat
ttaccagttacaatatgcactgggtaaagcagacacctagacagggcctggaatggattggagctatttatccaggaaatggtgatact
tcctacaatcagaagttcaagggcaaggccacactgactgtagacaaatcctccagcacagcctacatgcagctcagcagcctgac
atctgaagactctgcggtctatttctgtgcaagagtggtgtactatagtaactcttactggtacttcgatgtctggggcacagggaccac
ggtcaccgtctcttctgatcag
Amino acid sequence:
mdfqvqifsfllisasviiargqivlsqspailsaspgekvtmtcrasssvsymhwyqqkpgsspkpwiyapsnlasgvparfsg
sgsgtsysltisrveaedaatyycqqwsfnpptfgagtkleskdgggsggggsggggssqaylqqsgaesvrpgasvkmscka
sgytftsynmhwvkqtprqglewigaiypgngdtsynqkfkgkatltvdkssstaymqlssltsedsavyfcarvvyysnsyw
yfdvwgtgttvtvssdq
10. Human IgD hinge linker with attached restriction sites
Nucleotide:
gtggatccaggttcgaagtctccaaaggcacaggcctcctccgtgcccactgcacaaccccaagcagagggcagcctcgccaagg
caaccacagccccagccaccacccgtaacacaggaagaggaggagaagagaagaagaaggagaaggagaaagaggaacaag
aagagagagagacaaagaccggtgcagtcgacg
Amino acid:
vdpgskspkaqassvptaqpqaegslakattapattrntgrggeekkkekekeeqeeretktgavd
Sequence of Native IgD hinge domain:
(includes a cysteine residue-we truncated the hinge prior to that residue for these
constructs:)
Nucleotide:
gagtctccaaaggcacaggcctcctccgtgcccactgcacaaccccaagcagagggcagcctcgccaaggcaaccacagcccca
gccaccacccgtaacacaggaagaggaggagaagagaagaagaaggagaaggagaaagaggaacaagaagagagagagac
aaagacaccagagtgtccgagccacacccagcctcttggcgtctacctgctaacccct
Amino acid sequence:
Espkaqassvptaqpqaegslakattapattrntgrggeekkkekekeeqeeretktpecpshtqplgvylltp
12. 2H7 VHL11S
Nucleotide sequence:
caggcttatctacagcagtctggggctgagtcggtgaggcctggggcctcagtgaagatgtcctgcaaggcttctggctacacattta
ccagttacaatatgcactgggtaaagcagacacctagacagggcctggaatggattggagctatttatccaggaaatggtgatacttc
ctacaatcagaagttcaagggcaaggccacactgactgtagacaaatcctccagcacagcctacatgcagctcagcagcctgacat
ctgaagactctgcggtctatttctgtgcaagagtggtgtactatagtaactcttactggtacttcgatgtctggggcacagggaccacgg
tcaccgtctcttct
Amino acid sequence:
qaylqqsgaesvrpgasvkmsckasgytftsynmhwvkqtprqglewigaiypgngdtsynqkfkgkatltvdkssstaym
qlssltsedsavyfcarvvyysnsywyfdvwgtgttvtvss
13. 2H7 VH L11S scFv
Nucleotide sequence:
aagcttgccgccatggattttcaagtgcagattttcagcttcctgctaatcagtgcttcagtcataattgccagaggacaaattgttctctc
ccagtctccagcaatcctgtctgcatctccaggggagaaggtcacaatgacttgcagggccagctcaagtgtaagttacatgcactgg
taccagcagaagccaggatcctcccccaaaccctggatttatgccccatccaacctggcttctggagtccctgctcgcttcagtggca
gtgggtctgggacctcttactctctcacaatcagcagagtggaggctgaagatgctgccacttattactgccagcagtggagttttaac
ccacccacgttcggtgctgggaccaagctggagctgaaagatggcggtggctcgggcggtggtggatctggaggaggtgggagc
tctcaggcttatctacagcagtctggggctgagtcggtgaggcctggggcctcagtgaagatgtcctgcaaggcttctggctacacat
ttaccagttacaatatgcactgggtaaagcagacacctagacagggcctggaatggattggagctatttatccaggaaatggtgatact
tcctacaatcagaagttcaagggcaaggccacactgactgtagacaaatcctccagcacagcctacatgcagctcagcagcctgac
atctgaagactctgcggtctatttctgtgcaagagtggtgtactatagtaactcttactggtacttcgatgtctggggcacagggaccac
ggtcaccgtctcttctgatcag
Amino acid sequence:
mdfqvqifsfllisasviiargqivlsqspailsaspgekvtmtcrasssvsymhwyqqkpgsspkpwiyapsnlasgvparfsg
sgsgtsysltisrveaedaatyycqqwsfnpptfgagtklelkdgggsggggsggggssqaylqqsgaesvrpgasvkmsckas
gytftsynmhwvkqtprqglewigaiypgngdtsynqkfkgkatltvdkssstaymqlssltsedsavyfcarvvyysnsywy
fdvwgtgttvtvssdq
14. 2H7 scFv VH L11S hIgG1 (CSC-S)H WCH2 WCH3
Nucleotide sequence:
aagcttgccgccatggattttcaagtgcagattttcagcttcctgctaatcagtgcttcagtcataattgccagaggacaaattgttctctc
ccagtctccagcaatcctgtctgcatctccaggggagaaggtcacaatgacttgcagggccagctcaagtgtaagttacatgcactgg
taccagcagaagccaggatcctcccccaaaccctggatttatgccccatccaacctggcttctggagtccctgctcgcttcagtggca
gtgggtctgggacctcttactctctcacaatcagcagagtggaggctgaagatgctgccacttattactgccagcagtggagttttaac
ccacccacgttcggtgctgggaccaagctggagctgaaagatggcggtggctcgggcggtggtggatctggaggaggtgggagc
tctcaggcttatctacagcagtctggggctgagtctgtgaggcctggggcctcagtgaagatgtcctgcaaggcttctggctacacatt
taccagttacaatatgcactgggtaaagcagacacctagacagggcctggaatggattggagctatttatccaggaaatggtgatactt
cctacaatcagaagttcaagggcaaggccacactgactgtagacaaatcctccagcacagcctacatgcagctcagcagcctgaca
tctgaagactctgcggtctatttctgtgcaagagtggtgtactatagtaactcttactggtacttcgatgtctggggcacagggaccacg
gtcaccgtctcttctgatcaggagcccaaatcttgtgacaaaactcacacatctccaccgtgctcagcacctgaactcctgggtggacc
gtcagtcttcctcttccccccaaaacccaaggacaccctcatgatctcccggacccctgaggtcacatgcgtggtggtggacgtgag
ccacgaagaccctgaggtcaagttcaactggtacgtggacggcgtggaggtgcataatgccaagacaaagccgcgggaggagca
gtacaacagcacgtaccgtgtggtcagcgtcctcaccgtcctgcaccaggactggctgaatggcaaggagtacaagtgcaaggtct
ccaacaaagccctcccagcccccatcgagaaaacaatctccaaagccaaagggcagccccgagaaccacaggtgtacaccctgc
ccccatcccgggatgagctgaccaagaaccaggtcagcctgacctgcctggtcaaaggcttctatccaagcgacatcgccgtggag
tgggagagcaatgggcagccggagaacaactacaagaccacgcctcccgtgctggactccgacggctccttcttcctctacagcaa
gctcaccgtggacaagagcaggtggcagcaggggaacgtcttctcatgctccgtgatgcatgaggctctgcacaaccactacacgc
agaagagcctctccctgtctccgggtaaatgatctaga
Amino acid sequence:
mdfqvqifsfllisasviiargqivlsqspailsaspgekvtmtcrasssvsymhwyqqkpgsspkpwiyapsnlasgvparfsg
sgsgtsysltisrveaedaatyycqqwsfnpptfgagtklelkdgggsggggsggggssqaylqqsgaesvrpgasvkmsckas
gytftsynmhwvkqtprqglewigaiypgngdtsynqkfkgkatltvdkssstaymqlssltsedsavyfcarvvyysnsywy
fdvwgtgttvtvssdqepkscdkthtsppcsapellggpsvflfppkpkdtlmisrtpevtcvvvdvshedpevkfnwyvdgv
evhnaktkpreeqynstyrvvsvltvlhqdwlngkeykckvsnkalpapiektiskakgqprepqvytlppsrdeltknqvsltc
lvkgfypsdiavewesngqpennykttppvldsdgsfflyskltvdksrwqqgnvfscsvmhealhnhytqkslslspgk
15. 2H7 scFv VH L11S IgE WCH2 WCH3 WCH4
Nucleotide sequence:
aagcttgccgccatggattttcaagtgcagattttcagcttcctgctaatcagtgcttcagtcataattgccagaggacaaattgttctctc
ccagtctccagcaatcctgtctgcatctccaggggagaaggtcacaatgacttgcagggccagctcaagtgtaagttacatgcactgg
taccagcagaagccaggatcctcccccaaaccctggatttatgccccatccaacctggcttctggagtccctgctcgcttcagtggca
gtgggtctgggacctcttactctctcacaatcagcagagtggaggctgaagatgctgccacttattactgccagcagtggagttttaac
ccacccacgttcggtgctgggaccaagctggagctgaaagatggcggtggctcgggcggtggtggatctggaggaggtgggagc
tctcaggcttatctacagcagtctggggctgagtctgtgaggcctggggcctcagtgaagatgtcctgcaaggcttctggctacacatt
taccagttacaatatgcactgggtaaagcagacacctagacagggcctggaatggattggagctatttatccaggaaatggtgatactt
cctacaatcagaagttcaagggcaaggccacactgactgtagacaaatcctccagcacagcctacatgcagctcagcagcctgaca
tctgaagactctgcggtctatttctgtgcaagagtggtgtactatagtaactcttactggtacttcgatgtctggggcacagggaccacg
gtcaccgtctcttctgatcacgtctgctccagggacttcaccccgcccaccgtgaagatcttacagtcgtcctgcgacggcggcgggc
acttccccccgaccatccagctcctgtgcctcgtctctgggtacaccccagggactatcaacatcacctggctggaggacgggcagg
tcatggacgtggacttgtccaccgcctctaccacgcaggagggtgagctggcctccacacaaagcgagctcaccctcagccagaa
gcactggctgtcagaccgcacctacacctgccaggtcacctatcaaggtcacacctttgaggacagcaccaagaagtgtgcagattc
caacccgagaggggtgagcgcctacctaagccggcccagcccgttcgacctgttcatccgcaagtcgcccacgatcacctgtctgg
tggtggacctggcacccagcaaggggaccgtgaacctgacctggtcccgggccagtgggaagcctgtgaaccactccaccagaa
aggaggagaagcagcgcaatggcacgttaaccgtcacgtccaccctgccggtgggcacccgagactggatcgagggggagacc
taccagtgcagggtgacccacccccacctgcccagggccctcatgcggtccacgaccaagaccagcggcccgcgtgctgccccg
gaagtctatgcgtttgcgacgccggagtggccggggagccgggacaagcgcaccctcgcctgcctgatccagaacttcatgcctg
aggacatctcggtgcagtggctgcacaacgaggtgcagctcccggacgcccggcacagcacgacgcagccccgcaagaccaag
ggctccggcttcttcgtcttcagccgcctggaggtgaccagggccgaatgggagcagaaagatgagttcatctgccgtgcagtccat
gaggcagcgagcccctcacagacegtccagcgagcggtgtctgtaaatcccggtaaatgataatctaga
Amino acid sequence:
mdfqvqifsfllisasviiargqivlsqspailsaspgekvtmtcrasssvsymhwyqqkpgsspkpwiyapsnlasgvparfsg
sgsgtsysltisrveaedaatyycqqwsfnpptfgagtklelkdgggsggggsggggssqaylqqsgaesvrpgasvkmsckas
gytftsynmhwvkqtprqglewigaiypgngdtsynqkfkgkatltvdkssstaymqlssltsedsavyfcarvvyysnsywy
fdvwgtgttvtvssdhvcsrdftpptvkilqsscdggghfpptiqllclvsgytpgtinitwledgqvmdvdlstasttqegelastq
seltlsqkhwlsdrtytcqvtyqghtfedstkkcadsnprgvsaylsrpspfdlfirksptitclvvdlapskgtvnltwsrasgkpv
nhstrkeekqrngtltvtstlpvgtrdwiegetyqcrvthphlpralmrsttktsgpraapevyafatpewpgsrdkrtlacliqnfm
pedisvqwlhnevqlpdarhsttqprktkgsgffvfsrlevtraeweqkdeficravheaaspsqtvqravsvnpgk
16. 2H7 scFv VH L11S mIgE WCH2 WCH3 WCH4
Nucleotide sequence:
aagcttgccgccatggattttcaagtgcagattttcagcttcctgctaatcagtgcttcagtcataattgccagaggacaaattgttctctc
ccagtctccagcaatcctgtctgcatctccaggggagaaggtcacaatgacttgcagggccagctcaagtgtaagttacatgcactgg
taccagcagaagccaggatcctcccccaaaccctggatttatgccccatccaacctggcttctggagtccctgctcgcttcagtggca
gtgggtctgggacctcttactctctcacaatcagcagagtggaggctgaagatgctgccacttattactgccagcagtggagttttaac
ccacccacgttcggtgctgggaccaagctggagctgaaagatggcggtggctcgggcggtggtggatctggaggaggtgggagc
tctcaggcttatctacagcagtctggggctgagtctgtgaggcctggggcctcagtgaagatgtcctgcaaggcttctggctacacatt
taccagttacaatatgcactgggtaaagcagacacctagacagggcctggaatggattggagctatttatccaggaaatggtgatactt
cctacaatcagaagttcaagggcaaggccacactgactgtagacaaatcctccagcacagcctacatgcagctcagcagcctgaca
tctgaagactctgcggtctatttctgtgcaagagtggtgtactatagtaactcttactggtacttcgatgtctggggcacagggaccacg
gtcaccgtctcttctgatcacgttcgacctgtcaacatcactgagcccaccttggagctactccattcatcctgcgaccccaatgcattcc
actccaccatccagctgtactgcttcatttatggccacatcctaaatgatgtctctgtcagctggctaatggacgatcgggagataactg
atacacttgcacaaactgttctaatcaaggaggaaggcaaactagcctctacctgcagtaaactcaacatcactgagcagcaatggat
gtctgaaagcaccttcacctgcaaggtcacctcccaaggcgtagactatttggcccacactcggagatgcccagatcatgagccacg
gggtgtgattacctacctgatcccacccagccccctggacctgtatcaaaacggtgctcccaagcttacctgtctggtggtggacctg
gaaagcgagaagaatgtcaatgtgacgtggaaccaagagaagaagacttcagtctcagcatcccagtggtacactaagcaccacaa
taacgccacaactagtatcacctccatcctgcctgtagttgccaaggactggattgaaggctacggctatcagtgcatagtggaccac
cctgattttcccaagcccattgtgcgttccatcaccaagaccccaggccagcgctcagcccccgaggtatatgtgttcccaccaccag
aggaggagagcgaggacaaacgcacactcacctgtttgatccagaacttcttccctgaggatatctctgtgcagtggctgggggatg
gcaaactgatctcaaacagccagcacagtaccacaacacccctgaaatccaatggctccaatcaaggcttcttcatcttcagtcgccta
gaggtcgccaagacactctggacacagagaaaacagttcacctgccaagtgatccatgaggcacttcagaaacccaggaaactgg
agaaaacaatatccacaagccttggtaacacctccctccgtccatcctagtaatctagag
Amino acid sequence:
mdfqvqifsfllisasviiargqivlsqspailsaspgekvtmtcrasssvsymhwyqqkpgsspkpwiyapsnlasgvparfsg
sgsgtsysltisrveaedaatyycqqwsfnpptfgagtklelkdgggsggggsggggssqaylqqsgaesvrpgasvkmsckas
gytftsynmhwvkqtprqglewigaiypgngdtsynqkfkgkatltvdkssstaymqlssltsedsavyfcarvvyysnsywy
fdvwgtgttvtvssdhvrpvniteptlellhsscdpnafhstiqlycfiyghilndvsvswlmddreitdtlaqtvlikeegklastcs
klniteqqwmsestftckvtsqgvdylahtrrcpdheprgvitylippspldlyqngapkltclvvdleseknvnvtwnqekkts
vsasqwytkhhnnattsitsilpvvakdwiegygyqcivdhpdfpkpivrsitktpgqrsapevyvfpppeeesedkrtltcliqn
ffpedisvqwlgdgklisnsqhstttplksngsnqgffifsrlevaktlwtqrkqftcqvihealqkprklektistslgntslrps
17. 2H7 scFv VH L11S hIgA WH WCH2 T4CH3
Nucleotide sequence:
aagcttgccgccatggattttcaagtgcagattttcagcttcctgctaatcagtgcttcagtcataattgccagaggacaaattgttctctc
ccagtctccagcaatcctgtctgcatctccaggggagaaggtcacaatgacttgcagggccagctcaagtgtaagttacatgcactgg
taccagcagaagccaggatcctcccccaaaccctggatttatgccccatccaacctggcttctggagtccctgctcgcttcagtggca
gtgggtctgggacctcttactctctcacaatcagcagagtggaggctgaagatgctgccacttattactgccagcagtggagttttaac
ccacccacgttcggtgctgggaccaagctggagctgaaagatggcggtggctcgggcggtggtggatctggaggaggtgggagc
tctcaggcttatctacagcagtctggggctgagtctgtgaggcctggggcctcagtgaagatgtcctgcaaggcttctggctacacatt
taccagttacaatatgcactgggtaaagcagacacctagacagggcctggaatggattggagctatttatccaggaaatggtgatactt
cctacaatcagaagttcaagggcaaggccacactgactgtagacaaatcctccagcacagcctacatgcagctcagcagcctgaca
tctgaagactctgcggtctatttctgtgcaagagtggtgtactatagtaactcttactggtacttcgatgtctggggcacagggaccacg
gtcaccgtctcttctgatcagccagttccctcaactccacctaccccatctccctcaactccacctaccccatctccctcatgctgccacc
cccgactgtcactgcaccgaccggccctcgaggacctgctcttaggttcagaagcgatcctcacgtgcacactgaccggcctgaga
gatgcctcaggtgtcaccttcacctggacgccctcaagtgggaagagcgctgttcaaggaccacctgaccgtgacctctgtggctgc
tacagcgtgtccagtgtcctgccgggctgtgccgagccatggaaccatgggaagaccttcacttgcactgctgcctaccccgagtcc
aagaccccgctaaccgccaccctctcaaaatccggaaacacattccggcccgaggtccacctgctgccgccgccgtcggaggagc
tggccctgaacgagctggtgacgctgacgtgcctggcacgtggcttcagccccaaggatgtgctggttcgctggctgcaggggtca
caggagctgccccgcgagaagtacctgacttgggcatcccggcaggagcccagccagggcaccaccaccttcgctgtgaccagc
atactgcgcgtggcagccgaggactggaagaagggggacaccttctcctgcatggtgggccacgaggccctgccgctggccttca
cacagaagaccatcgaccgcttggcgggtaaacccacccatgtcaatgtgtctgttgtcatggcggaggtggactgataatctaga
Amino acid sequence:
mdfqvqifsfllisasviiargqivlsqspailsaspgekvtmtcrasssvsymhwyqqkpgsspkpwiyapsnlasgvparfsg
sgsgtsysltisrveaedaatyycqqwsfnpptfgagtklelkdgggsggggsggggssqaylqqsgaesvrpgasvkmsckas
gytftsynmhwvkqtprqglewigaiypgngdtsynqkfkgkatltvdkssstaymqlssltsedsavyfcarvvyysnsywy
fdvwgtgttvtvssdqpvpstpptpspstpptpspscchprlslhrpaledlllgseailtctltglrdasgvtftwtpssgksavqgp
pdrdlcgcysvssvlpgcaepwnhgktftctaaypesktpltatlsksgntfrpevhllpppseelalnelvtltclargfspkdvlvr
wlqgsqelprekyltwasrqepsqgtttfavtsilrvaaedwkkgdtfscmvghealplaftqktidrlagkpthvnvsvvmaev
d
18. 2H7 scFv VH L11S mIgA WH WCH2 T4 CH3
Nucleotide sequence:
aagcttgccgccatggattttcaagtgcagattttcagcttcctgctaatcagtgcttcagtcataattgccagaggacaaattgttctctc
ccagtctccagcaatcctgtctgcatctccaggggagaaggtcacaatgacttgcagggccagctcaagtgtaagttacatgcactgg
taccagcagaagccaggatcctcccccaaaccctggatttatgccccatccaacctggcttctggagtccctgctcgcttcagtggca
gtgggtctgggacctcttactctctcacaatcagcagagtggaggctgaagatgctgccacttattactgccagcagtggagttttaac
ccacccacgttcggtgctgggaccaagctggagctgaaagatggcggtggctcgggcggtggtggatctggaggaggtgggagc
tctcaggcttatctacagcagtctggggctgagtctgtgaggcctggggcctcagtgaagatgtcctgcaaggcttctggctacacatt
taccagttacaatatgcactgggtaaagcagacacctagacagggcctggaatggattggagctatttatccaggaaatggtgatactt
cctacaatcagaagttcaagggcaaggccacactgactgtagacaaatcctccagcacagcctacatgcagctcagcagcctgaca
tctgaagactctgcggtctatttctgtgcaagagtggtgtactatagtaactcttactggtacttcgatgtctggggcacagggaccacg
gtcaccgtctcttctgatcacatctgttctcctcctactactcctcctccaccttcctgccagcccagcctgtcactgcagcggccagctc
ttgaggacctgctcctgggttcagatgccagcatcacatgtactctgaatggcctgagagatcctgagggagctgtcttcacctggga
gccctccactgggaaggatgcagtgcagaagaaagctgtgcagaattcctgcggctgctacagtgtgtccagcgtcctgcctggctg
tgctgagcgctggaacagtggcgcatcattcaagtgcacagttacccatcctgagtctgacaccttaactggcacaattgccaaagtc
acagtgaacaccttcccaccccaggtccacctgctaccgccgccgtcggaggagctggccctgaatgagctcgtgtccctgacatg
cctggtgcgagctttcaaccctaaagaagtgctggtgcgatggctgcatggaaatgaggagctgtccccagaaagctacctagtgttt
gagcccctaaaggagccaggcgagggagccaccacctacctggtgacaagcgtgttgcgtgtatcagctgaaatctggaaacagg
gtgaccagtactcctgcatggtgggccacgaggccttgcccatgaacttcacccagaagaccatcgaccgtctgtcgggtaaaccca
ccaatgtcagcgtgtctgtgatcatgtcagagggagattgataatctagat
Amino acid sequence:
mdfqvqifsfllisasviiargqivlsqspailsaspgekvtmtcrasssvsymhwyqqkpgsspkpwiyapsnlasgvparfsg
sgsgtsysltisrveaedaatyycqqwsfnpptfgagtklelkdgggsggggsggggssqaylqqsgaesvrpgasvkmsckas
gytftsynmhwvkqtprqglewigaiypgngdtsynqkfkgkatltvdkssstaymqlssltsedsavyfcarvvyysnsywy
fdvwgtgttvtvssdhicsppttppppscqpslslqrpaledlllgsdasitctlnglrdpegavftwepstgkdavqkkavqnscg
cysvssvlpgcaerwnsgasfkctvthpesdtltgtiakvtvntfppqvhllpppseelalnelvsltclvrafnpkevlvrwlhgn
eelspesylvfeplkepgegattylvtsvlrvsaeiwkqgdqyscmvghealpmnftqktidrlsgkptnvsvsvimsegd
    A. mIgA WCH2 T4CH3
Nucleotide sequence:
Gttgttgatcacatctgttctcctcctactactcctcctccaccttcctgccagcccagcctgtcactgcagcggccagctcttgaggac
ctgctcctgggttcagatgccagcatcacatgtactctgaatggcctgagagatcctgagggagctgtcttcacctgggagccctcca
ctgggaaggatgcagtgcagaagaaagctgtgcagaattcctgcggctgctacagtgtgtccagcgtcctgcctggctgtgctgagc
gctggaacagtggcgcatcattcaagtgcacagttacccatcctgagtctgacaccttaactggcacaattgccaaagtcacagtgaa
caccttcccaccccaggtccacctgctaccgccgccgtcggaggagctggccctgaatgagctcgtgtccctgacatgcctggtgc
gagctttcaaccctaaagaagtgctggtgcgatggctgcatggaaatgaggagctgtccccagaaagctacctagtgtttgagcccct
aaaggagccaggcgagggagccaccacctacctggtgacaagcgtgttgcgtgtatcagctgaaatctggaaacagggtgaccag
tactcctgcatggtgggccacgaggccttgcccatgaacttcacccagaagaccatcgaccgtctgtcgggtaaacccaccaatgtc
agcgtgtctgtgatcatgtcagagggagattgataatctagat
Amino acid sequence:
dhicsppttppppscqpslslqrpaledlllgsdasitctlnglrdpegavftwepstgkdavqkkavqnscgcysvssvlpgcaer
wnsgasfkctvthpesdtltgtiakvtvntfppqvhllpppseelalnelvsltclvrafnpkevlvrwlhgneelspesylvfeplk
epgegattylvtsvlrvsaeiwkqgdqyscmvghealpmnftqktidrlsgkptnvsvsvimsegd
20. K322S CH2 region
Nucleotide sequence:
cctgaactcctggggggaccgtcagtcttcctcttccccccaaaacccaaggacaccctcatgatctcccggacccctgaggtcacat
gcgtggtggtggacgtgagccacgaagaccctgaggtcaagttcaactggtacgtggacggcgtggaggtgcataatgccaagac
aaagccgcgggaggagcagtacaacagcacgtaccgtgtggtcagcgtcctcaccgtcctgcaccaggactggctgaatggcaa
ggagtacaagtgctcggtctccaacaaagccctcccagcccccatcgagaaaacaatctccaaagccaaa
Amino acid sequence:
pellggpsvflfppkpkdtlmisrtpevtcvvvdvshedpevkfnwyvdgvevhnaktkpreeqynstyrvvsvltvlhqdwl
ngkeykcsvsnkalpapiektiskak
21. K322S CH2 WCH3
Nucleotide sequence:
cctgaactcctggggggaccgtcagtcttcctcttccccccaaaacccaaggacaccctcatgatctcccggacccctgaggtcacat
gcgtggtggtggacgtgagccacgaagaccctgaggtcaagttcaactggtacgtggacggcgtggaggtgcataatgccaagac
aaagccgcgggaggagcagtacaacagcacgtaccgtgtggtcagcgtcctcaccgtcctgcaccaggactggctgaatggcaa
ggagtacaagtgctcggtctccaacaaagccctcccagcccccatcgagaaaacaatctccaaagccaaagggcagccccgaga
accacaggtgtacaccctgcccccatcccgggatgagctgaccaagaaccaggtcagcctgacctgcctggtcaaaggcttctatc
ccagcgacatcgccgtggagtgggagagcaatgggcagccggagaacaactacaagaccacgcctcccgtgctggactccgac
ggctccttcttcctctacagcaagctcaccgtggacaagagcaggtggcagcaggggaacgtcttctcatgctccgtgatgcatgag
gctctgcacaaccactacacgcagaagagcctctccctgtctccgggtaaatgatctaga
Amino acid sequence:
Pellggpsvflfppkpkdtlmisrtpevtcvvvdvshedpevkfnwyvdgvevhnaktkpreeqynstyrvvsvltvlhqdwl
ngkeykcsvsnkalpapiektiskakgqprepqvytlppsrdeltknqvsltclvkgfypsdiavewesngqpennykttppvl
dsdgsfflyskltvdksrwqqgnvfscsvmhealhnhytqkslslspgk
        1. K322L CH2 WCH3
Nucleotide sequence:
tgatcaggagcccaaatcttctgacaaaactcacacatccccaccgtcctcagcacctgaactcctggggggaccgtcagtcttcctc
ttccccccaaaacccaaggacaccctcatgatctcccggacccctgaggtcacatgcgtggtggtggacgtgagccacgaagaccc
tgaggtcaagttcaactggtacgtggacggcgtggaggtgcataatgccaagacaaagccgcgggaggagcagtacaacagcac
gtaccgtgtggtcagcgtcctcaccgtcctgcaccaggactggctgaatggcaaggagtacaagtgcctggtctccaacaaagccct
cccagcccccatcgagaaaacaatctccaaagccaaagggcagccccgagaaccacaggtgtacaccctgcccccatcccggga
tgagctgaccaagaaccaggtcagcctgacctgcctggtcaaaggcttctatcccagcgacatcgccgtggagtgggagagcaatg
ggcagccggagaacaactacaagaccacgcctcccgtgctggactccgacggctccttcttcctctacagcaagctcaccgtggac
aagagcaggtggcagcaggggaacgtcttctcatgctccgtgatgcatgaggctctgcacaaccactacacgcagaagagcctctc
cctgtctccgggtaaatgatctaga
Amino acid sequence:
Dqepkssdkthtsppssapellggpsvflfppkpkdtlmisrtpevtcvvvdvshedpevkfnwyvdgvevhnaktkpreeq
ynstyrvvsvltvlhqdwlngkeykclvsnkalpapiektiskakgqprepqvytlppsrdeltknqvsltclvkgfypsdiave
wesngqpennykttppvldsdgsfflyskltvdksrwqqgnvfscsvmhealhnhytqkslslspgk
22. 2H7 scFv VHL11S hIgG1 (SSS-S)H K322SCH2 WCH3
Nucleotide sequence:
aagcttgccgccatggattttcaagtgcagattttcagcttcctgctaatcagtgcttcagtcataattgccagaggacaaattgttctctc
ccagtctccagcaatcctgtctgcatctccaggggagaaggtcacaatgacttgcagggccagctcaagtgtaagttacatgcactgg
taccagcagaagccaggatcctcccccaaaccctggatttatgccccatccaacctggcttctggagtccctgctcgcttcagtggca
gtgggtctgggacctcttactctctcacaatcagcagagtggaggctgaagatgctgccacttattactgccagcagtggagttttaac
ccacccacgttcggtgctgggaccaagctggagctgaaagatggcggtggctcgggcggtggtggatctggaggaggtgggagc
tctcaggcttatctacagcagtctggggctgagtcggtgaggcctggggcctcagtgaagatgtcctgcaaggcttctggctacacat
```

[0858] ttaccagttacaatatgcactgggtaaagcagacacctagacagggcctggaatggattggagctatttatccaggaaatggtgatact
tcctacaatcagaagttcaagggcaaggccacactgactgtagacaaatcctccagcacagcctacatgcagctcagcagcctgac
atctgaagactctgcggtctatttctgtgcaagagtggtgtactatagtaactcttactggtacttcgatgtctggggcacagggaccac
ggtcaccgtctcttctgatcaggagcccaaatcttctgacaaaactcacacatccccaccgtcctcagcacctgaactcctgggggga
ccgtcagtcttcctcttccccccaaaacccaaggacaccctcatgatctcccggacccctgaggtcacatgcgtggtggtggacgtga
gccacgaagaccctgaggtcaagttcaactggtacgtggacggcgtggaggtgcataatgccaagacaaagccgcgggaggagc
agacaacagcacgtaccgtgtggtcagcgtcctcaccgtcctgcaccaggactggctgaatggcaaggagtacaagtgctcggtct
ccaacaaagccctcccagcccccatcgagaaaacaatctccaaagccaaagggcagccccgagaaccacaggtgtacaccctgc
ccccatcccgggatgagctgaccaagaaccaggtcagcctgacctgcctggtcaaaggcttctatcccagcgacatcgccgtggag
tgggagagcaatgggcagccggagaacaactacaagaccacgcctcccgtgctggactccgacggctccttcttcctctacagcaa
gctcaccgtggacaagagcaggtggcagcaggggaacgtcttctcatgctccgtgatgcatgaggctctgcacaaccactacacgc
agaagagcctctccctgtctccgggtaaatgatctaga
Amino acid sequence:
mdfqvqifsfllisasviiargqivlsqspailsaspgekvtmtcrasssvsymhwyqqkpgsspkpwiyapsnlasgvparfsg
sgsgtsysltisrveaedaatyycqqwsfnpptfgagtklelkdgggsggggsggggssqaylqqsgaesvrpgasvkmsckas
gytftsynmhwvkqtprqglewigaiypgngdtsynqkfkgkatltvdkssstaymqlssltsedsavyfcarvvyysnsywy
fdvwgtgttvtvssdqepkssdkthtsppssapellggpsvflfppkpkdtlmisrtpevtcvvvdvshedpevkfnwyvdgv
evhnaktkpreeqynstyrvvsvltvlhqdwlngkeykcsvsnkalpapiektiskakgqprepqvytlppsrdeltknqvsltc
lvkgfypsdiavewesngqpennykttppvldsdgsfflyskltvdksrwqqgnvfscsvmhealhnhytqkslslspgk
23. 2H7 scFv VHL11S hIgG1 (SSS-S)H K322LCH2 WCH3
Nucleotide sequence:
aagcttgccgccatggattttcaagtgcagattttcagcttcctgctaatcagtgcttcagtcataattgccagaggacaaattgttctctc
ccagtctccagcaatcctgtctgcatctccaggggagaaggtcacaatgacttgcagggccagctcaagtgtaagttacatgcactgg
taccagcagaagccaggatcctcccccaaaccctggatttatgccccatccaacctggcttctggagtccctgctcgcttcagtggca
gtgggtctgggacctcttactctctcacaatcagcagagtggaggctgaagatgctgccacttattactgccagcagtggagttttaac
ccacccacgttcggtgctgggaccaagctggagctgaaagatggcggtggctcgggcggtggtggatctggaggaggtgggagc
tctcaggcttatctacagcagtctggggctgagtcggtgaggcctggggcctcagtgaagatgtcctgcaaggcttctggctacacat
ttaccagttacaatatgcactgggtaaagcagacacctagacagggcctggaatggattggagctatttatccaggaaatggtgatact
tcctacaatcagaagttcaagggcaaggccacactgactgtagacaaatcctccagcacagcctacatgcagctcagcagcctgac
atctgaagactctgcggtctatttctgtgcaagagtggtgtactatagtaactcttactggtacttcgatgtctggggcacagggaccac
ggtcaccgtctcttctgatcaggagcccaaatcttctgacaaaactcacacatccccaccgtcctcagcacctgaactcctgggggga
ccgtcagtcttcctcttccccccaaaacccaaggacaccctcatgatctcccggacccctgaggtcacatgcgtggtggtggacgtga
gccacgaagaccctgaggtcaagttcaactggtacgtggacggcgtggaggtgcataatgccaagacaaagccgcgggaggagc
agtacaacagcacgtaccgtgtggtcagcgtcctcaccgtcctgcaccaggactggctgaatggcaaggagtacaagtgcctggtct
ccaacaaagccctcccagcccccatcgagaaaacaatctccaaagccaaagggcagccccgagaaccacaggtgtacaccctgc
ccccatcccgggatgagctgaccaagaaccaggtcagcctgacctgcctggtcaaaggcttctatcccagcgacatcgccgtggag
tgggagagcaatgggcagccggagaacaactacaagaccacgcctcecgtgctggactccgacggctccttcttcctctacagcaa
gctcaccgtggacaagagcaggtggcagcaggggaacgtcttctcatgctccgtgatgcatgaggctctgcacaaccactacacgc
agaagagcctctccctgtctccgggtaaatgatctaga
Amino acid sequence:
mdfqvqifsflhisasviiargqivlsqspailsaspgekvtmtcrasssvsymhwyqqkpgsspkpwiyapsnlasgvparfsg
sgsgtsysltisrveaedaatyycqqwsfnpptfgagtklelkdgggsggggsggggssqaylqqsgaesvrpgasvkmsckas
gytftsynmhwvkqtprqglewigaiypgngdtsynqkfkgkatltvdkssstaymqlssltsedsavyfcarvvyysnsywy
fdvwgtgttvtvssdqepkssdkthtsppssapellggpsvflfppkpkdtlmisrtpevtcvvvdvshedpevkfnwyvdgv
evhnaktkpreeqynstyrvvsvltvlhqdwlngkeykclvsnkalpapiektiskakgqprepqvytlppsrdeltknqvsltcl
vkgfypsdiavewesngqpennykttppvldsdgsfflyskltvdksrwqqgnvfscsvmhealhnhytqkslslspgk
24. 2H7 scFv VHL11S hIgG1 (CSS-S)H K322SCH2 WCH3
Nucleotide sequence:
aagcttgccgccatggattttcaagtgcagattttcagcttcctgctaatcagtgcttcagtcataattgccagaggacaaattgttctctc
ccagtctccagcaatcctgtctgcatctccaggggagaaggtcacaatgacttgcagggccagctcaagtgtaagttaeatgcactgg
taccagcagaagccaggatcctcccccaaaccctggatttatgccccatccaacctggcttctggagtccctgctcgcttcagtggca
gtgggtctgggacctcttactctctcacaatcagcagagtggaggctgaagatgctgccacttattactgccagcagtggagttttaac
ccacccacgttcggtgctgggaccaagctggagctgaaagatggcggtggctcgggcggtggtggatctggaggaggtgggagc
tctcaggcttatctacagcagtctggggctgagtcggtgaggcctggggcctcagtgaagatgtcctgcaaggcttctggctacacat
ttaccagttacaatatgcactgggtaaagcagacacctagacagggcctggaatggattggagctatttatccaggaaatggtgatact
tcctacaatcagaagttcaagggcaaggccacactgactgtagacaaatcctccagcacagcctacatgcagctcagcagcctgac
atctgaagactctgcggtctatttctgtgcaagagtggtgtactatagtaactcttactggtacttcgatgtctggggcacagggaccac
ggtcaccgtctcttctgatcaggagcccaaatcttgtgacaaaactcacacatccccaccgtcctcagcacctgaactcctgggggga
ccgtcagtcttcctcttccccccaaaacccaaggacaccctcatgatctcccggacccctgaggtcacatgcgtggtggtggacgtga
gccacgaagaccctgaggtcaagttcaactggtacgtggacggcgtggaggtgcataatgccaagacaaagccgcgggaggagc
agtacaacagcacgtaccgtgtggtcagcgtcctcaccgtcctgcaccaggactggctgaatggcaaggagtacaagtgctcggtct
ccaacaaagccctcccagcccccatcgagaaaacaatctccaaagccaaagggcagccccgagaaccacaggtgtacaccctgc
ccccatcccgggatgagctgaccaagaaccaggtcagcctgacctgcctggtcaaaggcttctatcccagcgacatcgccgtggag
tgggagagcaatgggcagccggagaacaactacaagaccacgcctcccgtgctggactccgacggctccttcttcctctacagcaa
gctcaccgtggacaagagcaggtggcagcaggggaacgtcttctcatgctccgtgatgcatgaggctctgcacaaccactacacgc
agaagagcctctccctgtctccgggtaaatgatctaga
Amino acid sequence:
mdfqvqifsflhisasviiargqivlsqspailsaspgekvtmtcrasssvsymhwyqqkpgsspkpwiyapsnlasgvparfsg
sgsgtsysltisrveaedaatyycqqwsfnpptfgagtklelkdgggsggggsggggssqaylqqsgaesvrpgasvkmsckas
gytftsynmhwvkqtprqglewigaiypgngdtsynqkfkgkatltvdkssstaymqlssltsedsavyfcarvvyysnsywy
fdvwgtgttvtvssdqepkscdkthtsppssapellggpsvflfppkpkdtlmisrtpevtcvvvdvshedpevkfnwyvdgv
evhnaktkpreeqynstyrvvsvltvlhqdwlngkeykcsvsnkalpapiektiskakgqprepqvytlppsrdeltknqvsltc
lvkgfypsdiavewesngqpennykttppvldsdgsfflyskltvdksrwqqgnvfscsvmhealhnhytqkslslspgk
25. P331S CH2
Nucleotide sequence:
cctgaactcctggggggaccgtcagtcttcctcttccccccaaaacccaaggacaccctcatgatctcccggacccctgaggtcacat
gcgtggtggtggacgtgagccacgaagaccctgaggtcaagttcaactggtacgtggacggcgtggaggtgcataatgccaagac
aaagccgcgggaggagcagtacaacagcacgtaccgtgtggtcagcgtcctcaccgtcctgcaccaggactggctgaatggcaa
ggagtacaagtgcaaggtctccaacaaagccctcccagcctccatcgagaaaacaatctccaaagccaaa
Amino acid sequence
Pellggpsvflfppkpkdtlmisrtpevtcvvvdvshedpevkfhwyvdgvevhnaktkpreeqynstyrvvsvltvlhqdwl
ngkeykckvsnkalpasiektiskak
26. P331S CH2 WCH3
Nucleotide sequence:
cctgaactcctggggggaccgtcagtcttcctcttccccccaaaacccaaggacaccctcatgatctcccggacccctgaggtcacat
gcgtggtggtggacgtgagccacgaagaccctgaggtcaagttcaactggtacgtggacggcgtggaggtgcataatgccaagac
aaagccgcgggaggagcagtacaacagcacgtaccgtgtggtcagcgtcctcaccgtcctgcaccaggactggctgaatggcaa
ggagtacaagtgcaaggtctccaacaaagccctcccagcctccatcgagaaaacaatctccaaagccaaagggcagccccgaga
accacaggtgtacaccctgcccccatcccgggatgagctgaccaagaaccaggtcagcctgacctgcctggtcaaaggcttctatc
ccagcgacatcgccgtggagtgggagagcaatgggcagccggagaacaactacaagaccacgcctcccgtgctggactccgac
ggctccttcttcctctacagcaagctcaccgtggacaagagcaggtggcagcaggggaacgtcttctcatgctccgtgatgcatgag
gctctgcacaaccactacacgcagaagagcctctccctgtctccgggtaaatgatctaga
Amino acid sequence
pellggpsvflfppkpkdtlmisrtpevtcvvvdvshedpevkfnwyvdgvevhnaktkpreeqynstyrvvsvltvlhqdwl
ngkeykckvsnkalpasiektiskakgqprepqvytlppsrdeltknqvsltclvkgfypsdiavewesngqpennykttppvl
dsdgsfflyskltvdksrwqqgnvfscsvmhealhnhytqkslslspgk
27. 2H7 scFv VH L11S (SSS-S)H P331S CH2 WCH3
Nucleotide sequence:
aagcttgccgccatggattttcaagtgcagattttcagcttcctgctaatcagtgcttcagtcataattgccagaggacaaattgttctctc
ccagtctccagcaatcctgtctgcatctccaggggagaaggtcacaatgacttgcagggccagctcaagtgtaagttacatgcactgg
taccagcagaagccaggatcctcccccaaaccctggatttatgccccatccaacctggcttctggagtccctgctcgcttcagtggca
gtgggtctgggacctcttactctctcacaatcagcagagtggaggctgaagatgctgccacttattactgccagcagtggagttttaac
ccacccacgttcggtgctgggaccaagctggagctgaaagatggcggtggctcgggcggtggtggatctggaggaggtgggagc
tctcaggcttatctacagcagtctggggctgagtcggtgaggcctggggcetcagtgaagatgtcctgcaaggcttctggctacacat
ttaccagttacaatatgcactgggtaaagcagacacctagacagggcctggaatggattggagctatttatccaggaaatggtgatact
tcctacaatcagaagttcaagggcaaggccacactgactgtagacaaatcctccagcacagcctacatgcagctcagcagcctgac
atctgaagactctgcggtctatttctgtgcaagagtgactatagtaactcttactggtacttcgatgtctggggcacagggaccac
ggtcaccgtctcttctgatcaggagcccaaatcttctgacaaaactcacacatccccaccgtcctcagcacctgaactcctgggggga
ccgtcagcttcctcttccccccaaaacccaaggacaccctcatgatctcccggacccctgaggtcacatgcgtggtggtggacgtga
gccacgaagaccctgaggtcaagttcaactggtacgtggacggcgtggaggtgcataatgccaagacaaagccgcgggaggagc
agtacaacagcacgtaccgtgtggtcagcgtcctcaccgtcctgcaccaggactggctgaatggcaaggagtacaagtgcaaggtc
tccaacaaagccctcccagcctccatcgagaaaacaatctccaaagccaaagggcagccccgagaaccacaggtgtacaccctgc
ccccatcccgggatgagctgaccaagaaccaggtcagcctgacctgcctggtcaaaggcttctatcccagcgacatcgccgtggag
tgggagagcaatgggcagccggagaacaactacaagaccacgcctcccgtgctggactccgacggctccttcttcctctacagcaa
gctcaccgtggacaagagcaggtggcagcaggggaacgtcttctcatgctccgtgatgcatgaggctctgcacaaccactacacgc
agaagagcctctccctgtctccgggtaaatgatctaga
Amino acid sequence
mdfqvqifsflhisasviiargqivlsqspailsaspgekvtmtcrasssvsymhwyqqkpgsspkpwiyapsnlasgvparfsg
sgsgtsysltisrveaedaatyycqqwsfnpptfgagtklelkdgggsggggsggggssqaylqqsgaesvrpgasvkmsckas
gytftsynmhwvkqtprqglewigaiypgngdtsynqkfkgkatltvdkssstaymqlssltsedsavyfcarvvyysnsywy
fdvwgtgttvtvssdqepkssdkthtsppssapellggpsvflfppkpkdtlmisrtpevtcvvvdvshedpevkfnwyvdgv
evhnaktkpreeqynstyrvvsvltvlhqdwlngkeykckvsnkalpasiektiskakgqprepqvytlppsrdeltknqvsltc
lvkgfypsdiavewesngqpennykttppvldsdgsfflyskltvdksrwqqgnvfscsvmhealhnhytqkslslspgk
28. 2H7 scFv VH L11S (CSS-S)H P331S CH2 WCH3
Nucleotide sequence:
aagcttgccgccatggattttcaagtgcagattttcagcttcctgctaatcagtgcttcagtcataattgccagaggacaaattgttctctc
ccagtctccagcaatcctgtctgcatctccaggggagaaggtcacaatgacttgcagggccagctcaagtgtaagttacatgcactgg
taccagcagaagccaggatcctcccccaaaccctggatttatgccccatccaacctggcttctggagtccctgctcgcttcagtggca
gtgggtctgggacctcttactctctcacaatcagcagagtggaggctgaagatgctgccacttattactgccagcagtggagttttaac
ccacccacgttcggtgctgggaccaagctggagctgaaagatggcggtggctcgggcggtggtggatctggaggaggtgggagc
tctcaggcttatctacagcagtctggggctgagtcggtgaggcctggggcctcagtgaagatgtcctgcaaggcttctggctacacat
ttaccagttacaatatgcactgggtaaagcagacacctagacagggcctggaatggattggagctatttatccaggaaatggtgatact
tcctacaatcagaagttcaagggcaaggccacactgactgtagacaaatcctccagcacagcctacatgcagctcagcagcctgac
atctgaagactctgcggtctatttctgtgcaagagtggtgtactatagtaactcttactggtacttcgatgtctggggcacagggaccac
ggtcaccgtctcttctgatcaggagcccaaatcttgtgacaaaactcacacatccccaccgtcctcagcacctgaactcctgggggga
ccgtcagtcttcctcttccccccaaaacccaaggacaccctcatgatctcccggacccctgaggtcacatgcgtggtggtggacgtga
gccacgaagaccctgaggtcaagttcaactggtacgtggacggcgtggaggtgcataatgccaagacaaagccgcgggaggagc
agtacaacagcacgtaccgtgtggtcagcgtcctcaccgtcctgcaccaggactggctgaatggcaaggagtacaagtgcaaggtc
tccaacaaagccctcccagcctccatcgagaaaacaatctccaaagccaaagggcagccccgagaaccacaggtgtacaccctgc
ccccatcccgggatgagctgaccaagaaccaggtcagcctgacctgcctggtcaaaggcttctatcccagcgacatcgccgtggag
tgggagagcaatgggcagccggagaacaactacaagaccacgcctcccgtgctggactccgacggctccttcttcctctacagcaa
gctcaccgtggacaagagcaggtggcagcaggggaacgtcttctcatgctccgtgatgcatgaggctctgcacaaccactacacgc
agaagagcctctccctgtctccgggtaaatgatctaga
Amino acid sequence
mdfqvqifsflhisasviiargqivlsqspailsaspgekvtmtcrasssvsymhwyqqkpgsspkpwiyapsnlasgvparfsg
sgsgtsysltisrveaedaatyycqqwsfnpptfgagtklelkdgggsggggsggggssqaylqqsgaesvrpgasvkmsckas
gytftsynmhwvkqtprqglewigaiypgngdtsynqktkgkatltvdkssstaymqlssltsedsavyfcarvvyysnsywy
fdvwgtgttvtvssdqepkscdkthtsppssapellggpsvflfppkpkdtlmisrtpevtcvvvdvshedpevkfnwyvdgv
evhnaktkpreeqynstyrvvsvltvlhqdwlngkeykckvsnkalpasiektiskakgqprepqvytlppsrdeltknqvsltc
lvkgfypsdiavewesngqpennykttppvldsdgsfflyskltvdksrwqqgnvfscsvmhealhnhytqkslslspgk
29. T256N CH2 region
Nucleotide sequence:
Cctgaactcctggggggaccgtcagtcttcctcttccccccaaaacccaaggacaccctcatgatctcccggaaccctgaggtcaca
tgcgtggtggtggacgtgagccacgaagaccctgaggtcaagttcaactggtacgtggacggcgtggaggtgcataatgccaaga
caaagccgcgggaggagcagtacaacagcacgtaccgtgtggtcagcgtcctcaccgtcctgcaccaggactggctgaatggcaa
ggagtacaagtgcaaggtctccaacaaagccctcccagcccccatcgagaaaacaatctccaaagccaaa
Amino acid sequence
pellggpsvflfppkpkdtlmisrnpevtcvvvdvshedpevkfnwyvdgvevhnaktkpreeqynstyrvvsvltvlhqdw
lngkeykckvsnkalpapiektiskak
30. T256N CH2 WCH3
Nucleotide sequence:
cctgaactcctggggggaccgtcagtcttcctcttccccccaaaacccaaggacaccctcatgatctcccggaaccctgaggtcacat
gcgtggtggtggacgtgagccacgaagaccctgaggtcaagttcaactggtacgtggacggcgtggaggtgcataatgccaagac
aaagccgcgggaggagcagtacaacagcacgtaccgtgtggtcagcgtcctcaccgtcctgcaccaggactggctgaatggcaa
ggagtacaagtgcaaggtctccaacaaagccctcccagcccccatcgagaaaacaatctccaaagccaaagggcagccccgaga
accacaggtgtacaccctgcccccatcccgggatgagctgaccaagaaccaggtcagcctgacctgcctggtcaaaggcttctatc
ccagcgacatcgccgtggagtgggagagcaatgggcagccggagaacaactacaagaccacgcctcccgtgctggactccgac
ggctccttcttcctctacagcaagctcaccgtggacaagagcaggtggcagcaggggaacgtcttctcatgctccgtgatgcatgag
gctctgcacaaccactacacgcagaagagcctctccctgtctccgggtaaatgatctaga
Amino acid sequence
pellggpsvflfppkpkdtlmisrnpevtcvvvdvshedpevkfhwyvdgvevhnaktkpreeqynstyrvvsvltvlhqdw
lngkeykckvsnkalpapiektiskakgqprepqvytlppsrdeltknqvsltclvkgfypsdiavewesngqpennykttppv
ldsdgsfflyskltvdksrwqqgnvfscsvmhealhnhytqkslslspgk
31. 2H7 scFv VH L11S (SSS-S)H T256N CH2 WCH3
Nucleotide sequence:
aagcttgccgccatggattttcaagtgcagattttcagcttcctgctaatcagtgcttcagtcataattgccagaggacaaattgttctctc
ccagtctccagcaatcctgtctgcatctccaggggagaaggtcacaatgacttgcagggccagctcaagtgtaagttacatgcactgg
taccagcagaagccaggatcctcccccaaaccctggatttatgccccatccaacctggcttctggagtccctgctcgcttcagtggca
gtgggtctgggacctcttactctctcacaatcagcagagtggaggctgaagatgctgccacttattactgccagcagtggagttttaac
ccacccacgttcggtgctgggaccaagctggagctgaaagatggcggtggctcgggcggtggtggatctggaggaggtgggagc
tctcaggcttatctacagcagtctggggctgagtcggtgaggcctggggcctcagtgaagatgtcctgcaaggcttctggctacacat
ttaccagttacaatatgcactgggtaaagcagacacctagacagggcctggaatggattggagctatttatccaggaaatggtgatact
tcctacaatcagaagttcaagggcaaggccacactgactgtagacaaatcctccagcacagcctacatgcagctcagcagcctgac
atctgaagactctgcggtctatttctgtgcaagagtggtgtactatagtaactcttactggtacttcgatgtctggggcacagggaccac
ggtcaccgtctcttctgatcaggagcccaaatcttctgacaaaactcacacatccccaccgtcctcagcacctgaactcctgggggga
ccgtcagtcttcctcttccccccaaaacccaaggacaccctcatgatctcccggaaccctgaggtcacatgcgtggtggtggacgtga
gccacgaagaccctgaggtcaagttcaactggtacgtggacggcgtggaggtgcataatgccaagacaaagccgcgggaggagc
agtacaacagcacgtaccgtgtggtcagcgtcctcaccgtcctgcaccaggactggctgaatggcaaggagtacaagtgcaaggtc
tccaacaaagccctcccagcccccatcgagaaaacaatctccaaagccaaagggcagccccgagaaccacaggtgtacaccctg
cccccatcccgggatgagctgaccaagaaccaggtcagcctgacctgcctggtcaaaggcttctatcccagcgacatcgccgtgga
gtgggagagcaatgggcagccggagaacaactacaagaccacgcctcccgtgctggactccgacggctccttcttcctctacagca
agctcaccgtggacaagagcaggtggcagcaggggaacgtcttctcatgctccgtgatgcatgaggctctgcacaaccactacacg
cagaagagcctctccctgtctccgggtaaatgatctaga
Amino acid sequence
mdfqvqifsflhisasviiargqivlsqspailsaspgekvtmtcrasssvsymhwyqqkpgsspkpwiyapsnlasgvparfsg
sgsgtsysltisrveaedaatyycqqwsfnpptfgagtklelkdgggsggggsggggssqaylqqsgaesvrpgasvkmsckas
gytftsynmhwvkqtprqglewigaiypgngdtsynqkfkgkathvdkssstaymqlssltsedsavyfcarvvyysnsywy
fdvwgtgttvtvssdqepkssdkthtsppssapellggpsvflfppkpkdtlmisrnpevtcvvvdvshedpevkfnwyvdgv
evhnaktkpreeqynstyrvvsvltvlhqdwlngkeykckvsnkalpapiektiskakgqprepqvytlppsrdeltknqvsltc
lvkgfypsdiavewesngqpennykttppvldsdgsfflyskltvdksrwqqgnvfscsvmhealhnhytqkslslspgk
32. 2H7 scFv VH L11S (CSS-S)H T256N CH2 WCH3
Nucleotide sequence:
aagcttgccgccatggattttcaagtgcagattttcagcttcctgctaatcagtgcttcagtcataattgccagaggacaaattgttctctc
ccagtctccagcaatcctgtctgcatctccaggggagaaggtcacaatgacttgcagggccagctcaagtgtaagttacatgcactgg
taccagcagaagccaggatcctcccccaaaccctggatttatgccccatccaacctggcttctggagtccctgctcgcttcagtggca
gtgggtctgggacctcttactctctcacaatcagcagagtggaggctgaagatgctgccacttattactgccagcagtggagttttaac
ccacccacgttcggtgctgggaccaagctggagctgaaagatggcggtggctcgggcggtggtggatctggaggaggtgggagc
tctcaggcttatctacagcagtctggggctgagtcggtgaggcctggggcctcagtgaagatgtcctgcaaggcttctggctacacat
ttaccagttacaatatgcactgggtaaagcagacacctagacagggcctggaatggattggagctatttatccaggaaatggtgatact
tcctacaatcagaagttcaagggcaaggccacactgactgtagacaaatcctccagcacagcctacatgcagctcagcagcctgac
atctgaagactctgcggtctatttctgtgcaagagtggtgtactatagtaactcttactggtacttcgatgtctggggcacagggaccac
ggtcaccgtctcttctgatcaggagcccaaatcttgtgacaaaactcacacatccccaccgtcctcagcacctgaactcctgggggga
ccgtcagtcttcctcttccccccaaaacccaaggacaccctcatgatctcccggaaccctgaggtcacatgcgtggtggtggacgtga
gccacgaagaccctgaggtcaagttcaactggtacgtggacggcgtggaggtgcataatgccaagacaaagccgcgggaggagc
agtacaacagcacgtaccgtgtggtcagcgtcctcaccgtcctgcaccaggactggctgaatggcaaggagtacaagtgcaaggtc
tccaacaaagccctcccagcccccatcgagaaaacaatctccaaagccaaagggcagccccgagaaccacaggtgtacaccctg
cccccatcccgggatgagctgaccaagaaccaggtcagcctgacctgcctggtcaaaggcttctatcccagcgacatcgccgtgga
gtgggagagcaatgggcagccggagaacaactacaagaccacgcctcccgtgctggactccgacggctccttcttcctctacagca
agctcaccgtggacaagagcaggtggcagcaggggaacgtcttctcatgctccgtgatgcatgaggctctgcacaaccactacacg
cagaagagcctctccctgtctccgggtaaatgatctaga
Amino acid sequence
mdfqvqifsflhisasviiargqivlsqspailsaspgekvtmtcrasssvsymhwyqqkpgsspkpwiyapsnlasgvparfsg
sgsgtsysltisrveaedaatyycqqwsfnpptfgagtklelkdgggsggggsggggssqaylqqsgaesvrpgasvkmsckas
gytftsynmhwvkqtprqglewigaiypgngdtsynqkfkgkatltvdkssstaymqlssltsedsavyfcarvvyysnsywy
fdvwgtgttvtvssdqepkscdkthtsppssapellggpsvflfppkpkdtlmisrnpevtcvvvdvshedpevkfnwyvdgv
evhnaktkpreeqynstyrvvsvltvlhqdwlngkeykckvsnkalpapiektiskakgqprepqvytlppsrdeltknqvsltc
lvkgfypsdiavewesngqpennykttppvldsdgsfflyskltvdksrwqqgnvfscsvmhealhnhytqkslslspgk
33. RTPE/QNAK (255-258) CH2
Nucleotide sequence:
cctgaactcctggggggaccgtcagtcttcctcttccccccaaaacccaaggacaccctcatgatctcccagaacgctaaggtcacat
gcgtggtggtggacgtgagccacgaagaccctgaggtcaagttcaactggtacgtggacggcgtggaggtgcataatgccaagac
aaagccgcgggaggagcagtacaacagcacgtaccgtgtggtcagcgtcctcaccgtcctgcaccaggactggctgaatggcaa
ggagtacaagtgcaaggtctccaacaaagccctcccagcccccatcgagaaaacaatctccaaagccaaa
Amino acid sequence
pellggpsvflfppkpkdtlmisqnakvtcvvvdvshedpevkfnwyvdgvevhnaktkpreeqynstyrvvsvltvlhqdw
lngkeykckvsnkalpapiektiskak
34. RTPE/QNAK (255-258)CH2 WCH3
Nucleotide sequence:
cctgaactcctggggggaccgtcagtcttcctcttccccccaaaacccaaggacaccctcatgatctcccagaacgctaaggtcacat
gcgtggtggtggacgtgagccacgaagaccctgaggtcaagttcaactggtacgtggacggcgtggaggtgcataatgccaagac
aaagccgcgggaggagcagtacaacagcacgtaccgtgtggtcagcgtcctcaccgtcctgcaccaggactggctgaatggcaa
ggagtacaagtgcaaggtctccaacaaagccctcccagcccccatcgagaaaacaatctccaaagccaaagggcagccccgaga
accacaggtgtacaccctgcccccatcccgggatgagctgaccaagaaccaggtcagcctgacctgcctggtcaaaggcttctatc
ccagcgacatcgccgtggagtgggagagcaatgggcagccggagaacaactacaagaccacgcctcccgtgctggactccgac
ggctccttcttcctctacagcaagctcaccgtggacaagagcaggtggcagcaggggaacgtcttctcatgctccgtgatgcatgag
gctctgcacaaccactacacgcagaagagcctctccctgtctccgggtaaatgatctaga
Amino acid sequence
pellggpsvflfppkpkdtlmisqnakvtcvvvdvshedpevkfnwyvdgvevhnaktkpreeqynstyrvvsvltvlhqdw
lngkeykckvsnkalpapiektiskakgqprepqvytlppsrdeltknqvsltclvkgfypsdiavewesngqpennykttppv
ldsdgsfflysklvvdksrwqqgnvfscsvmhealhnhytqkslslspgk
35. 2H7 scFv VH L11S (SSS-S)H RTPE/QNAK (255-258)CH2 WCH3
Nucleotide sequence:
aagcttgccgccatggattttcaagtgcagattttcagcttcctgctaatcagtgcttcagtcataattgccagaggacaaattgttctctc
ccagtctccagcaatcctgtctgcatctccaggggagaaggtcacaatgacttgcagggccagctcaagtgtaagttacatgcactgg
taccagcagaagccaggatcctcccccaaaccctggatttatgccccatccaacctggcttctggagtccctgctcgcttcagtggca
gtgggtctgggacctcttactctctcacaatcagcagagtggaggctgaagatgctgccacttattactgccagcagtggagttttaac
ccacccacgttcggtgctgggaccaagctggagctgaaagatggcggtggctcgggcggtggtggatctggaggaggtgggagc
tctcaggcttatctacagcagtctggggctgagtcggtgaggcctggggcctcagtgaagatgtcctgcaaggcttctggctacacat
ttaccagttacaatatgcactgggtaaagcagacacctagacagggcctggaatggattggagctatttatccaggaaatggtgatact
tcctacaatcagaagttcaagggcaaggccacactgactgtagacaaatcctccagcacagcctacatgcagctcagcagcctgac
atctgaagactctgcggtctatttctgtgcaagagtggtgtactatagtaactcttactggtacttcgatgtctggggcacagggaccac
ggtcaccgtctcttctgatcaggagcccaaatcttctgacaaaactcacacatccccaccgtcctcagcacctgaactcctgggggga
ccgtcagtcttcctcttccccccaaaacccaaggacaccctcatgatctcccagaacgctaaggtcacatgcgtggtggtggacgtga
gccacgaagaccctgaggtcaagttcaactggtacgtggacggcgtggaggtgcataatgccaagacaaagccgcgggaggagc
agtacaacagcacgtaccgtgtggtcagcgtcctcaccgtcctgcaccaggactggctgaatggcaaggagtacaagtgcaaggtc
tccaacaaagccctcccagcccccatcgagaaaacaatctccaaagccaaagggcagccccgagaaccacaggtgtacaccctg
cccccatcccgggatgagctgaccaagaaccaggtcagcctgacctgcctggtcaaaggcttctatcccagcgacatcgccgtgga
gtgggagagcaatgggcagccggagaacaactacaagaccacgcctcccgtgctggactccgacggctccttcttcctctacagca
agctcaccgtggacaagagcaggtggcagcaggggaacgtcttctcatgctccgtgatgcatgaggctctgcacaaccactacacg
cagaagagcctctccctgtctccgggtaaatgatctaga
Amino acid sequence
mdfqvqifsflhisasviiargqivlsqspailsaspgekvtmtcrasssvsymhwyqqkpgsspkpwiyapsnlasgvparfsg
sgsgtsysltisrveaedaatyycqqwsfnpptfgagtklelkdgggsggggsggggssqaylqqsgaesvrpgasvkmsckas
gytftsynmhwvkqtprqglewigaiypgngdtsynqktkgkatltvdkssstaymqlssltsedsavyfcarvvyysnsywy
fdvwgtgttvtvssdqepkssdkthtsppssapellggpsvflfppkpkdtlmisqnakvtcvvvdvshedpevkfnwyvdgv
evhnaktkpreeqynstyrvvsvltvlhqdwlngkeykckvsnkalpapiektiskakgqprepqvytlppsrdeltknqvsltc
lvkgfypsdiavewesngqpennykttppvldsdgsfflyskltvdksrwqqgnvfscsvmhealhnhytqkslslspgk
36. 2H7 scFv VH L11S (CSS-S)H RTPE/QNAK (255-258)CH2 WCH3
Nucleotide sequence:
aagcttgccgccatggacaagtgcagattttcagcttcctgctaatcagtgcttcagtcataattgccagaggacaaattgttctctc
ccagtctccagcaatcctgtctgcatctccaggggagaaggtcacaatgacttgcagggccagctcaagtgtaagttacatgcactgg
taccagcagaagccaggatcctcccccaaaccctggatttatgccccatccaacctggcttctggagtccctgctcgcttcagtggca
gtgggtctgggacctcttactctctcacaatcagcagagtggaggctgaagatgctgccacttattactgccagcagtggagttttaac
ccacccacgttcggtgctgggaccaagctggagctgaaagatggcggtggctcgggcggtggtggatctggaggaggtgggagc
tctcaggcttatctacagcagtctggggctgagtcggtgaggcctggggcctcagtgaagatgtcctgcaaggcttctggctacacat
ttaccagttacaatatgcactgggtaaagcagacacctagacagggcctggaatggattggagctatttatccaggaaatggtgatact
tcctacaatcagaagttcaagggcaaggccacactgactgtagacaaatcctccagcacagcctacatgcagctcagcagcctgac
atctgaagactctgcggtctatttctgtgcaagagtggtgtactatagtaactcttactggtacttcgatgtctggggcacagggaccac
ggtcaccgtctcttctgatcaggagcccaaatcttgtgacaaaactcacacatccccaccgtcctcagcacctgaactcctgggggga
ccgtcagtcttcctcttccccccaaaacccaaggacaccctcatgatctcccagaacgctaaggtcacatgcgtggtggtggacgtga
gccacgaagaccctgaggtcaagttcaactggtacgtggacggcgtggaggtgcataatgccaagacaaagccgcgggaggagc
agtacaacagcacgtaccgtgtggtcagcgtcctcaccgtcctgcaccaggactggctgaatggcaaggagtacaagtgcaaggtc
tccaacaaagccctcccagcccccatcgagaaaacaatctccaaagccaaagggcagccccgagaaccacaggtgtacaccctg
cccccatcccgggatgagctgaccaagaaccaggtcagcctgacctgcctggtcaaaggcttctatcccagcgacatcgccgtgga
gtgggagagcaatgggcagccggagaacaactacaagaccacgcctcccgtgctggactccgacggctccttcttcctctacagca
agctcaccgtggacaagagcaggtggcagcaggggaacgtcttctcatgctccgtgatgcatgaggctctgcacaaccactacacg
cagaagagcctctccctgtctccgggtaaatgatctaga
Amino acid sequence
mdfqvqifsflhisasviiargqivlsqspailsaspgekvtmtcrasssvsymhwyqqkpgsspkpwiyapsnlasgvparfsg
sgsgtsysltisrveaedaatyycqqwsfnpptfgagtklelkdgggsggggsggggssqaylqqsgaesvrpgasvkmsckas
gytftsynmhwvkqtprqglewigaiypgngdtsynqkfkgkatltvdkssstaymqlssltsedsavyfcarvvyysnsywy
fdvwgtgttvtvssdqepkscdkthtsppssapellggpsvflfppkpkdtlmisqnakvtcvvvdvshedpevkfnwyvdg
vevhnaktkpreeqynstyrvvsvltvlhqdwlngkeykckvsnkalpapiektiskakgqprepqvytlppsrdeltknqvslt
clvkgfypsdiavewesngqpennykttppvldsdgsfflyskltvdksrwqqgnvfscsvmhealhnhytqkslslspgk
36. K290Q CH2 region
Nucleotide sequence:
cctgaactcctggggggaccgtcagtcttcctcttccccccaaaacccaaggacaccctcatgatctcccggacccctgaggtcacat
gcgtggtggtggacgtgagccacgaagaccctgaggtcaagttcaactggtacgtggacggcgtggaggtgcataatgccaagac
acagccgcgggaggagcagtacaacagcacgtaccgtgtggtcagcgtcctcaccgtcctgcaccaggactggctgaatggcaa
ggagtacaagtgcaaggtctccaacaaagccctcccagcccccatcgagaaaacaatctccaaagccaaa
Amino acid sequence:
pellggpsvflfppkpkdtlmisrtpevtcvvvdvshedpevkfnwyvdgvevhnaktqpreeqynstyrvvsvltvlhqdwl
ngkeykckvsnkalpapiektiskak
37. K290Q CH2 WCH3
Nucleotide sequence:
cctgaactcctggggggaccgtcagtcttcctcttccccccaaaacccaaggacaccctcatgatctcccggacccctgaggtcaca
tgcgtggtggtggacgtgagccacgaagaccctgaggtcaagttcaactggtacgtggacggcgtggaggtgcataatgccaaga
cacagccgcgggaggagcagtacaacagcacgtaccgtgtggtcagcgtcctcaccgtcctgcaccaggactggctgaatggcaa
ggagtacaagtgcaaggtctccaacaaagccctcccagcccccatcgagaaaacaatctccaaagccaaagggcagccccgaga
accacaggtgtacaccctgcccccatcccgggatgagctgaccaagaaccaggtcagcctgacctgcctggtcaaaggcttctatc
ccagcgacatcgccgtggagtgggagagcaatgggcagccggagaacaactacaagaccacgcctcccgtgctggactccgac
ggctccttcttcctctacagcaagctcaccgtggacaagagcaggtggcagcaggggaacgtcttctcatgctccgtgatgcatgag
gctctgcacaaccactacacgcagaagagcctctccctgtctccgggtaaatgatctaga
Amino acid sequence:
pellggpsvflfppkpkdtlmisrtpevtcvvvdvshedpevkffiwyvdgvevhnaktqpreeqynstyrvvsvltvlhqdwl
ngkeykckvsnkalpapiektiskakgqprepqvytlppsrdeltknqvsltclvkgfypsdiavewesngqpennykttppvl
dsdgsfflyskltvdksrwqqgnvfscsvmhealhnhytqkslslspgk
38. 2H7 scFv VH L11S (SSS-S)H K290Q CH2 WCH3
Nucleotide sequence:
aagcttgccgccatggattttcaagtgcagattttcagcttcctgctaatcagtgcttcagtcataattgccagaggacaaattgttctctc
ccagtctccagcaatcctgtctgcatctccaggggagaaggtcacaatgacttgcagggccagctcaagtgtaagttacatgcactgg
taccagcagaagccaggatcctcccccaaaccctggatttatgccccatccaacctggcttctggagtccctgctcgcttcagtggca
gtgggtctgggacctcttactctctcacaatcagcagagtggaggctgaagatgctgccacttattactgccagcagtggagttttaac
ccacccacgttcggtgctgggaccaagctggagctgaaagatggcggtggctcgggcggtggtggatctggaggaggtgggagc
tctcaggcttatctacagcagtctggggctgagtcggtgaggcctggggcctcagtgaagatgtcctgcaaggcttctggctacacat
ttaccagttacaatatgcactgggtaaagcagacacctagacagggcctggaatggattggagctatttatccaggaaatggtgatact
tcctacaatcagaagttcaagggcaaggccacactgactgtagacaaatcctccagcacagcctacatgcagctcagcagcctgac
atctgaagactctgcggtctatttctgtgcaagagtggtgtactatagtaactcttactggtacttcgatgtctggggcacagggaccac
ggtcaccgtctcttctgatcaggagcccaaatcttctgacaaaactcacacatccccaccgtcctcagcacctgaactcctgggggga
ccgtcagtcttcctcttccccccaaaacccaaggacaccctcatgatctcccggacccctgaggtcacatgcgtggtggtggacgtga
gccacgaagaccctgaggtcaagttcaactggtacgtggacggcgtggaggtgcataatgccaagacacagccgcgggaggagc
agtacaacagcacgtaccgtgtggtcagcgtcctcaccgtcctgcaccaggactggctgaatggcaaggagtacaagtgcaaggtc
tccaacaaagccctcccagcccccatcgagaaaacaatctccaaagccaaagggcagccccgagaaccacaggtgtacaccctg
cccccatcccgggatgagctgaccaagaaccaggtcagcctgacctgcctggtcaaaggcttctatcccagcgacatcgccgtgga
gtgggagagcaatgggcagccggagaacaactacaagaccacgcctcccgtgctggactccgacggctccttcttcctctacagca
agctcaccgtggacaagagcaggtggcagcaggggaacgtcttctcatgctccgtgatgcatgaggctctgcacaaccactacacg
cagaagagcctctccctgtctccgggtaaatgatctaga
Amino acid sequence:
mdfqvqifsflhisasviiargqivlsqspailsaspgekvtmtcrasssvsymhwyqqkpgsspkpwiyapsnlasgvparfsg
sgsgtsysltisrveaedaatyycqqwsfnpptfgagtklelkdgggsggggsggggssqaylqqsgaesvrpgasvkmsckas
gytftsynmhwvkqtprqglewigaiypgngdtsynqkflgkatltvdkssstaymqlssltsedsavyfcarvvyysnsywy
fdvwgtgttvtvssdqepkssdkthtsppssapellggpsvflfppkpkdtlmisrtpevtcvvvdvshedpevkfnwyvdgv
evhnaktqpreeqynstyrvvsvltvlhqdwlngkeykckvsnkalpapiektiskakgqprepqvytlppsrdeltknqvsltc
lvkgfypsdiavewesngqpennykttppvldsdgsfflyskltvdksrwqqgnvfscsvmhealhnhytqkslslspgk
39. 2H7 scfv VH L11S (CSS-S)H K290Q CH2 WCH3
Nucleotide sequence:
aagcttgccgccatggattttcaagtgcagattttcagcttcctgctaatcagtgcttcagtcataattgccagaggacaaattgttctctc
ccagtctccagcaatcctgtctgcatctccaggggagaaggtcacaatgacttgcagggccagctcaagtgtaagttacatgcactgg
taccagcagaagccaggatcctcccccaaaccctggatttatgccccatccaacctggcttctggagtccctgctcgcttcagtggca
gtgggtctgggacctcttactctctcacaatcagcagagtggaggctgaagatgctgccacttattactgccagcagtggagttttaac
ccacccacgttcggtgctgggaccaagctggagctgaaagatggcggtggctcgggcggtggtggatctggaggaggtgggagc
tctcaggcttatctacagcagtctggggctgagtcggtgaggcctggggcctcagtgaagatgtcctgcaaggcttctggctacacat
ttaccagttacaatatgcactgggtaaagcagacacctagacagggcctggaatggattggagctatttatccaggaaatggtgatact
tcctacaatcagaagttcaagggcaaggccacactgactgtagacaaatcctccagcacagcctacatgcagctcagcagcctgac
atctgaagactctgcggtctatttctgtgcaagagtggtgtactatagtaactcttactggtacttcgatgtctggggcacagggaccac
ggtcaccgtctcttctgatcaggagcccaaatcttgtgacaaaactcacacatccccaccgtcctcagcacctgaactcctgggggga
ccgtcagtcttcctcttccccccaaaacccaaggacaccctcatgatctcccggacccctgaggtcacatgcgtggtggtggacgtga
gccacgaagaccctgaggtcaagttcaactggtacgtggacggcgtggaggtgcataatgccaagacacagccgcgggaggagc
agtacaacagcacgtaccgtgtggtcagcgtcctcaccgtcctgcaccaggactggctgaatggcaaggagtacaagtgcaaggtc
tccaacaaagccctcccagcccccatcgagaaaacaatctccaaagccaaagggcagccccgagaaccacaggtgtacaccctg
cccccatcccgggatgagctgaccaagaaccaggtcagcctgacctgcctggtcaaaggcttctatcccagcgacatcgccgtgga
gtgggagagcaatgggcagccggagaacaactacaagaccacgcctcccgtgctggactccgacggctccttcttcctctacagca
agctcaccgtggacaagagcaggtggcagcaggggaacgtcttctcatgctccgtgatgcatgaggctctgeacaaccactacacg
cagaagagcctctccctgtctccgggtaaatgatctaga
Amino acid sequence:
mdfqvqifsflhisasviiargqivlsqspailsaspgekvtmtcrasssvsymhwyqqkpgsspkpwiyapsnlasgvparfsg
sgsgtsysltisrveaedaatyycqqwsfhpptfgagtklelkdgggsggggsggggssqaylqqsgaesvrpgasvkmsckas
gytftsynmhwvkqtprqglewigaiypgngdtsynqkfkgkathvdkssstaymqlssltsedsavyfcarvvyysnsywy
fdvwgtgttvtvssdqepkscdkthtsppssapellggpsvflfppkpkdtlmisrtpevtcvvvdvshedpevkfnwyvdgv
evhnaktqpreeqynstyrvvsvltvlhqdwlngkeykckvsnkalpapiektiskakgqprepqvytlppsrdeltknqvsltc
lvkgfypsdiavewesngqpennykttppvldsdgsfflyskltvdksrwqqgnvfscsvmhealhnhytqkslslspgk
40. A339PCH2
Nucleotide sequence:
cctgaactcctggggggaccgtcagtcttcctcttccccccaaaacccaaggacaccctcatgatctcccggacccctgaggtcacat
gcgtggtggtggacgtgagccacgaagaccctgaggtcaagttcaactggtacgtggacggcgtggaggtgcataatgccaagac
aaagccgcgggaggagcagtacaacagcacgtaccgtgtggtcagcgtcctcaccgtcctgcaccaggactggctgaatggcaa
ggagtacaagtgcaaggtctccaacaaagccctcccagcccccatcgagaaaacaatctccaaacccaaa
Amino acid sequence:
pellggpsvflfppkpkdtlmisrtpevtcvvvdvshedpevkfnwyvdgvevhnaktkpreeqynstyrvvsvltvlhqdwl
ngkeykckvsnkalpapiektiskpk
41. A339P CH2 WCH3
Nucleotide sequence:
cctgaactcctggggggaccgtcagtcttcctcttccccccaaaacccaaggacaccctcatgatctcccggacccctgaggtcacat
gcgtggtggtggacgtgagccacgaagaccctgaggtcaagttcaactggtacgtggacggcgtggaggtgcataatgccaagac
aaagccgcgggaggagcagtacaacagcacgtaccgtgtggtcagcgtcctcaccgtcctgcaccaggactggctgaatggcaa
ggagtacaagtgcaaggtctccaacaaagccctcccagcccccatcgagaaaacaatctccaaacccaaagggcagccccgaga
accacaggtgtacaccctgcccccatcccgggatgagctgaccaagaaccaggtcagcctgacctgcctggtcaaaggcttctatc
ccagcgacatcgccgtggagtgggagagcaatgggcagccggagaacaactacaagaccacgcctcccgtgctggactccgac
ggctccttcttcctctacagcaagctcaccgtggacaagagcaggtggcagcaggggaacgtcttctcatgctccgtgatgcatgag
gctctgcacaaccactacacgcagaagagcctctccctgtctccgggtaaatgatctaga
Amino acid sequence:
pellggpsvflfppkpkdtlmisrtpevtcvvvdvshedpevkfnwyvdgvevhnaktkpreeqynstyrvvsvltvlhqdwl
ngkeykckvsnkalpapiektiskpkgqprepqvytlppsrdeltknqvsltclvkgfypsdiavewesngcipennykttppvl
dsdgsfflyskltvdksrwqqgnvfscsvmhealhnhytqkslslspgk
42. 2H7 scFv VHL11S (SSS-S)H A339P CH2 WCH3
Nucleotide sequence:
aagcttgccgccatggattttcaagtgcagattttcagcttcctgctaatcagtgcttcagtcataattgccagaggacaaattgttctctc
ccagtctccagcaatcctgtctgcatctccaggggagaaggtcacaatgacttgcagggccagctcaagtgtaagttacatgcactgg
taccagcagaagccaggatcctcccccaaaccctggatttatgccccatccaacctggcttctggagtccctgctcgcttcagtggca
gtgggtctgggacctcttactctctcacaatcagcagagtggaggctgaagatgctgccacttattactgccagcagtggagttttaac
ccacccacgttcggtgctgggaccaagctggagctgaaagatggcggtggctcgggcggtggtggatctggaggaggtgggagc
tctcaggcttatctacagcagtctggggctgagtcggtgaggcctggggcctcagtgaagatgtcctgcaaggcttctggctacacat
ttaccagttacaatatgcactgggtaaagcagacacctagacagggcctggaatggattggagctatttatccaggaaatggtgatact
tcctacaatcagaagttcaagggcaaggccacactgactgtagacaaatcctccagcacagcctacatgcagctcagcagcctgac
atctgaagactctgcggtctatttctgtgcaagagtggtgtactatagtaactcttactggtacttcgatgtctggggcacagggaccac
ggtcaccgtctcttctgatcaggagcccaaatcttctgacaaaactcacacatccccaccgtcctcagcacctgaactcctgggggga
ccgtcagtcttcctcttccccccaaaacccaaggacaccctcatgatctcccggacccctgaggtcacatgcgtggtggtggacgtga
gccacgaagaccctgaggtcaagttcaactggtacgtggacggcgtggaggtgcataatgccaagacaaagccgcgggaggagc
agtacaacagcacgtaccgtgtggtcagcgtcctcaccgtcctgcaccaggactggctgaatggcaaggagtacaagtgcaaggtc
tccaacaaagccctcccagcccccatcgagaaaacaatctccaaacccaaagggcagccccgagaaccacaggtgtacaccctgc
ccccatcccgggatgagctgaccaagaaccaggtcagcctgacctgcctggtcaaaggcttctatcccagcgacatcgccgtggag
tgggagagcaatgggcagccggagaacaactacaagaccacgcctcccgtgctggactccgacggctccttcttcctctacagcaa
gctcaccgtggacaagagcaggtggcagcaggggaacgtcttctcatgctccgtgatgcatgaggctctgcacaaccactacacgc
agaagagcctctccctgtctccgggtaaatgatctaga
Amino acid sequence:
mdfqvqifsflhisasviiargqivlsqspailsaspgekvtmtcrasssvsymhwyqqkpgsspkpwiyapsnlasgvparfsg
sgsgtsysltisrveaedaatyycqqwsfnpptfgagtklelkdgggsggggsggggssqaylqqsgaesvrpgasvkmsckas
gytftsynmhwvkqtprqglewigaiypgngdtsynqkfkgkatltvdkssstaymqlssltsedsavyfcarvvyysnsywy
fdvwgtgttvtvssdqepkssdkthtsppssapellggpsvflfppkpkdtlmisrtpevtcvvvdvshedpevkfnwyvdgv
evhnaktkpreeqynstyrvvsvltvlhqdwlngkeykckvsnkalpapiektiskpkgqprepqvytlppsrdeltknqvsltc
lvkgfypsdiavewesngqpennykttppvldsdgsfflyskltvdksrwqqgnvfscsvmhealhnhytqkslslspgk
43. 2H7 scFv VHL11S (CSS-S)H A339P CH2 WCH3
Nucleotide sequence:
aagcttgccgccatggattttcaagtgcagattttcagcttcctgctaatcagtgcttcagtcataattgccagaggacaaattgttctctc
ccagtctccagcaatcctgtctgcatctccaggggagaaggtcacaatgacttgcagggccagctcaagtgtaagttacatgcactgg
taccagcagaagccaggatcctcccccaaaccctggatttatgccccatccaacctggcttctggagtccctgctcgcttcagtggca
gtgggtctgggacctcttactctctcacaatcagcagagtggaggctgaagatgctgccacttattactgccagcagtggagttttaac
ccacccacgttcggtgctgggaccaagctggagctgaaagatggcggtggctcgggcggtggtggatctggaggaggtgggagc
tctcaggcttatctacagcagtctggggctgagtcggtgaggcctggggcctcagtgaagatgtcctgcaaggcttctggctacacat
ttaccagttacaatatgcactgggtaaagcagacacctagacagggcctggaatggattggagctatttatccaggaaatggtgatact
tcctacaatcagaagttcaagggcaaggccacactgactgtagacaaatcctccagcacagcctacatgcagctcagcagcctgac
atctgaagactctgcggtctatttctgtgcaagagtggtgtactatagtaactcttactggtacttcgatgtctggggcacagggaccac
ggtcaccgtctcttctgatcaggagcccaaatcttgtgacaaaactcacacatccccaccgtcctcagcacctgaactcctgggggga
ccgtcagtcttcctcttccccccaaaacccaaggacaccctcatgatctcccggacccctgaggtcacatgcgtggtggtggacgtga
gccacgaagaccctgaggtcaagttcaactggtacgtggacggcgtggaggtgcataatgccaagacaaagccgcgggaggagc
agtacaacagcacgtaccgtgtggtcagcgtcctcaccgtcctgcaccaggactggctgaatggcaaggagtacaagtgcaaggtc
tccaacaaagccctcccagcccccatcgagaaaacaatctccaaacccaaagggcagccccgagaaccacaggtgtacaccctgc
ccccatcccgggatgagctgaccaagaaccaggtcagcctgacctgcctggtcaaaggcttctatcccagcgacatcgccgtggag
tgggagagcaatgggcagccggagaacaactacaagaccacgcctcccgtgctggactccgacggctccttcttcctctacagcaa
gctcaccgtggacaagagcaggtggcagcaggggaacgtcttctcatgctccgtgatgcatgaggctctgcacaaccactacacgc
agaagagcctctccctgtctccgggtaaatgatctaga
Amino acid sequence:
mdfqvqifsflhisasviiargqivlsqspailsaspgekvtmtcrasssvsymhwyqqkpgsspkpwiyapsnlasgvparfsg
sgsgtsysltisrveaedaatyycqqwsfnpptfgagtklelkdgggsggggsggggssqaylqqsgaesvrpgasvkmsckas
gytftsynmhwvkqtprqglewigaiypgngdtsynqkfkgkatltvdkssstaymqlssltsedsavyfcarvvyysnsywy
fdvwgtgttvtvssdqepkscdkthtsppssapellggpsvflfppkpkdtlmisrtpevtcvvvdvshedpevkfnwyvdgv
evhnaktkpreeqynstyrvvsvltvlhqdwlngkeykckvsnkalpapiektiskpkgqprepqvytlppsrdeltknqvsltc
lvkgfypsdiavewesngcipennykttppvldsdgsfflyskltvdksrwqqgnvfscsvmhealhnhytqkslslspgk
44. G28-1VH
Nucleotide sequence:
gcggtccagctgcagcagtctggacctgagctggaaaagcctggcgcttcagtgaagatttcctgcaaggcttctggttactcattca
ctggctacaatatgaactgggtgaagcagaataatggaaagagccttgagtggattggaaatattgatccttattatggtggtactacct
acaaccggaagttcaagggcaaggccacattgactgtagacaaatcctccagcacagcctacatgcagctcaagagtctgacatctg
aggactctgcagtctattactgtgcaagatcggtcggccctatggactactggggtcaaggaacctcagtcaccgtctcttctgatcag
Amino acid sequence:
avqlqqsgpelekpgasvkisckasgysftgynmnwvkqnngkslewignidpyyggttynrkfkgkatltvdkssstaymq
lksltsedsavyycarsvgpmdywgqgtsvtvssdq
45. G28-1VL
Nucleotide sequence:
aagcttgccgccatggtatccacagctcagttccttgggttgctgctgctgtggcttacaggtggcagatgtgacatccagatgactca
gtctccagcctccctatctgcatctgtgggagagactgtcaccatcacatgtcgaacaagtgaaaatgtttacagttatttggcttggtat
cagcagaaacagggaaaatctcctcagctcctggtctcttttgcaaaaaccttagcagaaggtgtgccatcaaggttcagtggcagtg
gatcaggcacacagttttctctgaagatcagcagcctgcagcctgaagattctggaagttatttctgtcaacatcattccgataatccgtg
gacgttcggtggaggcaccgaactggagatcaaaggtggcggtggctcgggcggtggtgggtcgggtggcggcggatcgtca
Amino acid sequence:
mvstaqflgllllwltggrcdiqmtqspaslsasvgetvtitcrtsenvysylawyqqkqgkspqllvsfaktlaegvpsrfsgsgs
gtqfslkisslqpedsgsyfcqhhsdnpwtfgggteleikggggsggggsggggss
46. G28-1 scFv
Nucleotide sequence:
aagcttgccgccatggtatccacagctcagttccttgggttgctgctgctgtggcttacaggtggcagatgtgacatccagatgactca
gtctccagcctccctatctgcatctgtgggagagactgtcaccatcacatgtcgaacaagtgaaaatgtttacagttatttggcttggtat
cagcagaaacagggaaaatctcctcagctcctggtctcttttgcaaaaaccttagcagaaggtgtgccatcaaggttcagtggcagtg
gatcaggcacacagttttctctgaagatcagcagcctgcagcctgaagattctggaagttatttctgtcaacatcattccgataatccgtg
gacgttcggtggaggcaccgaactggagatcaaaggtggcggtggctcgggcggtggtgggtcgggtggcggcggatcgtcag
cggtccagctgcagcagtctggacctgagctggaaaagcctggcgcttcagtgaagatttcctgcaaggcttctggttactcattcact
ggctacaatatgaactgggtgaagcagaataatggaaagagccttgagtggattggaaatattgatccttattatggtggtactacctac
aaccggaagttcaagggcaaggccacattgactgtagacaaatcctccagcacagcctacatgcagctcaagagtctgacatctga
ggactctgcagtctauactgtgcaagatcggtcggccctatggactactggggtcaaggaacctcagtcaccglctcttctgatcag
Amino acid sequence:
mvstaqflgllllwltggrcdiqmtqspaslsasvgetvtitcrtsenvysylawyqqkqgkspqllvsfaktlaegvpsrfsgsgs
gtqfslkisslqpedsgsyfcqhhsdnpwtfgggteleikggggsggggsggggssavqlqqsgpelekpgasvkisckasgys
ftgynmnwvkqnngkslewignidpyyggttynrkfkgkatltvdkssstaymqlksltsedsavyycarsvgpmdywgqg
tsvtvssdq
47. G28-1 VHL11S
Nucleotide sequence:
gcggtccagctgcagcagtctggacctgagtcggaaaagcctggcgcttcagtgaagatttcctgcaaggcttctggttactcattca
ctggctacaatatgaactgggtgaagcagaataatggaaagagccttgagtggattggaaatattgatccttattatggtggtactacct
acaaccggaagttcaagggcaaggccacattgactgtagacaaatcctccagcacagcctacatgcagctcaagagtctgacatctg
aggactctgcagtctattactgtgcaagatcggtcggccctatggactactggggtcaaggaacctcagtcaccgtctcttctgatcag
Amino acid sequence:
avqlqqsgpesekpgasvkisckasgysftgynmnwvkqnngkslewignidpyyggttynrkfkgkatltvdkssstaym
qlksltsedsavyycarsvgpmdywgqgtsvtvssdq
48. G28-1 VHL11S scFv
Nucleotide sequence:
aagcttgccgccatggtatccacagctcagttccttgggttgctgctgctgtggcttacaggtggcagatgtgacatccagatgactca
gtctccagcctccctatctgcatctgtgggagagactgtcaccatcacatgtcgaacaagtgaaaatgtttacagttatttggcttggtat
cagcagaaacagggaaaatctcctcagctcctggtctcttttgcaaaaaccttagcagaaggtgtgccatcaaggttcagtggcagtg
gatcaggcacacagttttctctgaagatcagcagcctgcagcctgaagattctggaagttatttctgtcaacatcattccgataatccgtg
gacgttcggtggaggcaccgaactggagatcaaaggtggcggtggctcgggcggtggtgggtcgggtggcggcggatcgtcag
cggtccagctgcagcagtctggacctgagtcggaaaagcctggcgcttcagtgaagatttcctgcaaggcttctggttactcattcact
ggctacaatatgaactgggtgaagcagaataatggaaagagccttgagtggattggaaatattgatccttattatggtggtactacctac
aaccggaagttcaagggcaaggccacattgactgtagacaaatcctccagcacagcctacatgcagctcaagagtctgacatctga
ggactctgcagtctattactgtgcaagatcggtcggccctatggactactggggtcaaggaacctcagtcaccgtctcttctgatcag
Amino acid sequence:
mvstaqflgllllwltggrcdiqmtqspaslsasvgetvtitcrtsenvysylawyqqkqgkspqHvsfaktlaegvpsrfsgsgs
gtqfslkisslqpedsgsyfcqhhsdnpwtfgggteleikggggsggggsggggssavqlqqsgpesekpgasvkisckasgys
ftgynmnwvkqnngkslewignidpyyggttynrktkgkatltvdkssstaymqlksltsedsavyycarsvgpmdywgqg
tsvtvssdq
49. G28-1 scFv (SSS-S)H WCH2 WCH3
Nucleotide sequence:
aagcttgccgccatggtatccacagctcagttccttgggttgctgctgctgtggcttacaggtggcagatgtgacatccagatgactca
gtctccagcctccctatctgcatctgtgggagagactgtcaccatcacatgtcgaacaagtgaaaatgtttacagttatttggcttggtat
cagcagaaacagggaaaatctcctcagctcctggtctcttttgcaaaaaccttagcagaaggtgtgccatcaaggttcagtggcagtg
gatcaggcacacagttttctctgaagatcagcagcctgcagcctgaagattctggaagttatttctgtcaacatcattccgataatccgtg
gacgttcggtggaggcaccgaactggagatcaaaggtggcggtggctcgggcggtggtgggtcgggtggcggcggatcgtcag
cggtccagctgcagcagtctggacctgagctggaaaagcctggcgcttcagtgaagatttcctgcaaggcttctggttactcattcact
ggctacaatatgaactgggtgaagcagaataatggaaagagccttgagtggattggaaatattgatccttattatggtggtactacctac
aaccggaagttcaagggcaaggccacattgactgtagacaaatcctccagcacagcctacatgcagctcaagagtctgacatctga
ggactctgcagtctattactgtgcaagatcggtcggccctatggactactggggtcaaggaacctcagtcaccgtctcttctgatcatg
atcaggagcccaaatcttctgacaaaactcacacatccccaccgtcctcagcacctgaactcctggggggaccgtcagtcttcctcttc
cccccaaaacccaaggacaccctcatgatctcccggacccctgaggtcacatgcgtggtggtggacgtgagccacgaagaccctg
aggtcaagttcaactggtacgtggacggcgtggaggtgcataatgccaagacaaagccgcgggaggagcagtacaacagcacgt
accgtgtggtcagcgtcctcaccgtcctgcaccaggactggctgaatggcaaggagtacaagtgcaaggtctccaacaaagccctc
ccagcccccatcgagaaaacaatctccaaagccaaagggcagccccgagaaccacaggtgtacaccctgcccccatcccgggat
gagctgaccaagaaccaggtcagcctgacctgcctggtcaaaggcttctatcccagcgacatcgccgtggagtgggagagcaatg
ggcagccggagaacaactacaagaccacgcctcccgtgctggactccgacggctccttcttcctctacagcaagctcaccgtggac
aagagcaggtggcagcaggggaacgtcttctcatgctccgtgatgcatgaggctctgcacaaccactacacgcagaagagcctctc
cctgtctccgggtaaatgatctaga
Amino acid sequence:
mvstaqflgllllwltggrcdiqmtqspaslsasvgevvtitcrtsenvysylawyqqkqgkspqllvsfaktlaegvpsrfsgsgs
gtqfslkisslqpedsgsyfcqhhsdnpwtfgggteleikggggsggggsggggssavqlqqsgpelekpgasvkisckasgys
ftgynmnwvkqnngkslewignidpyyggttynrkfkgkatltvdkssstaymqlksltsedsavyycarsvgpmdywgqg
tsvtvssdhdqepkssdkthtsppssapellggpsvflfppkpkdtlmisrtpevtcvvvdvshedpevkfnwyvdgvevhna
ktkpreeqynstyrvvsvltvlhqdwlngkeykckvsnkalpapiektiskakgqprepqvytlppsrdeltknqvsltclvkgf
ypsdiavewesngqpennykttppvldsdgsfflyskhvdksrwqqgnvfscsvmhealhnhytqkslslspgk
50. G28-1 scFv IgAW H IgG1WCH2 WCH3
Nucleotide sequence:
aagcttgccgccatggtatccacagctcagttccttgggttgctgctgctgtggcttacaggtggcagatgtgacatccagatgactca
gtctccagcctccctatctgcatctgtgggagagactgtcaccatcacatgtcgaacaagtgaaaatgtttacagttatttggcttggtat
cagcagaaacagggaaaatctcctcagctcctggtctcttttgcaaaaaccttagcagaaggtgtgccatcaaggttcagtggcagtg
gatcaggcacacagttttctctgaagatcagcagcctgcagcctgaagattctggaagttatttctgtcaacatcattccgataatccgtg
gacgttcggtggaggcaccgaactggagatcaaaggtggcggtggctcgggcggtggtgggtcgggtggcggcggatcgtcag
cggtccagctgcagcagtctggacctgagctggaaaagcctggcgcttcagtgaagatttcctgcaaggcttctggttactcattcact
ggctacaatatgaactgggtgaagcagaataatggaaagagccttgagtggattggaaatattgatccttattatggtggtactacctac
aaccggaagttcaagggcaaggccacattgactgtagacaaatcctccagcacagcctacatgcagctcaagagtctgacatctga
ggactctgcagtctattactgtgcaagatcggtcggccctatggactactggggtcaaggaacctcagtcaccgtctcttctgatcagc
cagttccctcaactccacctaccccatctccctcaactccacctaccccatctccctcatgcgcacctgaactcctggggggaccgtca
gtcttcctcttccccccaaaacccaaggacaccctcatgatctcccggacccctgaggtcacatgcgtggtggtggacgtgagccac
gaagaccctgaggtcaagttcaactggtacgtggacggcgtggaggtgcataatgccaagacaaagccgcgggaggagcagtac
aacagcacgtaccgtgtggtcagcgtcctcaccgtcctgcaccaggactggctgaatggcaaggagtacaagtgcaaggtctccaa
caaagccctcccagcccccatcgagaaaacaatctccaaagccaaagggcagccccgagaaccacaggtgtacaccctgccccc
atcccgggatgagctgaccaagaaccaggtcagcctgacctgcctggtcaaaggcttctatcccagcgacatcgccgtggagtggg
agagcaatgggcagccggagaacaactacaagaccacgcctcccgtgctggactccgacggctccttcttcctctacagcaagctc
accgtggacaagagcaggtggcagcaggggaacgtcttctcatgctccgtgatgcatgaggctctgcacaaccactacacgcaga
agagcctctccctgtctccgggtaaatgatctaga
Amino acid sequence:
mvstaqflgllllwltggrcdiqmtqspaslsasvgetvtitcrtsenvysylawyqqkqgkspqllvsfaktlaegvpsrfsgsgs
gtqfslkisslqpedsgsyfcqhhsdnpwtfgggteleikggggsggggsggggssavqlqqsgpelekpgasvkisckasgys
ftgynmnwvkqnngkslewignidpyyggttynrkfkgkatltvdkssstaymqlksltsedsavyycarsvgpmdywgqg
tsvtvssdqpvpstpptpspstpptpspscapellggpsvflfppkpkdtlmisrtpevtcvvvdvshedpevkfnwyvdgvev
hnaktkpreeqynstyrvvsvltvlhqdwlngkeykckvsnkalpapiektiskakgciprepqvytlppsrdeltknqvsltclv
kgfypsdiavewesngcipennykttppvldsdgsfflyskltvdksrwqqgnvfscsvmhealhnhytqkslslspgk
51. G28-1 scFv VHL11S (SSS-S)H WCH2 WCH3
Nucleotide sequence:
aagcttgccgccatggtatccacagctcagttccttgggttgctgctgctgtggcttacaggtggcagatgtgacatccagatgactca
gtctccagcctccctatctgcatctgtgggagagactgtcaccatcacatgtcgaacaagtgaaaatgtttacagttatttggcttggtat
cagcagaaacagggaaaatctcctcagctcctggtctcttttgcaaaaaccttagcagaaggtgtgccatcaaggttcagtggcagtg
gatcaggcacacagttttctctgaagatcagcagcctgcagcctgaagattctggaagttatttctgtcaacatcattccgataatccgtg
gacgttcggtggaggcaccgaactggagatcaaaggtggcggtggctcgggcggtggtgggtcgggtggcggcggatcgtcag
cggtccagctgcagcagtctggacctgagtcggaaaagcctggcgcttcagtgaagatttcctgcaaggcttctggttactcattcact
ggctacaatatgaactgggtgaagcagaataatggaaagagccttgagtggattggaaatattgatccttattatggtggtactacctac
aaccggaagttcaagggcaaggccacattgactgtagacaaatcctccagcacagcctacatgcagctcaagagtctgacatctga
ggactctgcagtctattactgtgcaagatcggtcggccctatggactactggggtcaaggaacctcagtcaccgtctcttctgatcagg
agcccaaatcttctgacaaaactcacacatccccaccgtcctcagcacctgaactcctggggggaccgtcagtcttcctcttcccccc
aaaacccaaggacaccctcatgatctcccggacccctgaggtcacatgcgtggtggtggacgtgagccacgaagaccctgaggtc
aagttcaactggtacgtggacggcgtggaggtgcataatgccaagacaaagccgcgggaggagcagtacaacagcacgtaccgt
gtggtcagcgtcctcaccgtcctgcaccaggactggctgaatggcaaggagtacaagtgcaaggtctccaacaaagccctcccagc
ccccatcgagaaaacaatctccaaagccaaagggcagccccgagaaccacaggtgtacaccctgcccccatcccgggatgagct
gaccaagaaccaggtcagcctgacctgcctggtcaaaggcttctatcccagcgacatcgccgtggagtgggagagcaatgggcag
ccggagaacaactacaagaccacgcctcccgtgctggactccgacggctccttcttcctctacagcaagctcaccgtggacaagag
caggtggcagcaggggaacgtcttctcatgctccgtgatgcatgaggctctgcacaaccactacacgcagaagagcctctccctgtc
tccgggtaaatgatctaga
Amino acid sequence:
mvstaqflgllllwltggrcdiqmtqspaslsasvgetvtitcrtsenvysylawyqqkqgkspqllvsfaktlaegvpsrfsgsgs
gtqfslkisslqpedsgsyfcqhhsdnpwtfgggteleikggggsggggsggggssavqlqqsgpesekpgasvkisckasgys
ftgynmnwvkqnngkslewignidpyyggttynrkfkgkatltvdkssstaymqlksltsedsavyycarsvgpmdywgqg
tsvtvssdhdqepkssdkthtsppssapellggpsvflfppkpkdtlmisrtpevtcvvvdvshedpevkfnwyvdgvevhna
ktkpreeqynstyrvvsvltvlhqdwlngkeykckvsnkalpapiektiskakgqprepqvytlppsrdeltknqvsltclvkgf
ypsdiavewesngqpennykttppvldsdgsfflyskltvdksrwqqgnvfscsvmhealhnhytqkslslspgk
52. G28-1 scFv VHL11S (CSS-S)H WCH2 WCH3
Nucleotide sequence:
aagcttgccgccatggtatccacagctcagttccttgggttgctgctgctgtggcttacaggtggcagatgtgacatccagatgactca
gtctccagcctccctatctgcatctgtgggagagactgtcaccatcacatgtcgaacaagtgaaaatgtttacagttatttggcttggtat
cagcagaaacagggaaaatctcctcagctcctggtctcttttgcaaaaaccttagcagaaggtgtgccatcaaggttcagtggcagtg
gatcaggcacacagttttctctgaagatcagcagcctgcagcctgaagattctggaagttatttctgtcaacatcattccgataatccgtg
gacgttcggtggaggcaccgaactggagatcaaaggtggcggtggctcgggcggtggtgggtcgggtggcggcggatcgtcag
cggtccagctgcagcagtctggacctgagtcggaaaagcctggcgcttcagtgaagatttcctgcaaggcttctggttactcattcact
ggctacaatatgaactgggtgaagcagaataatggaaagagccttgagtggattggaaatattgatccttattatggtggtactacctac
aaccggaagttcaagggcaaggccacattgactgtagacaaatcctccagcacagcctacatgcagctcaagagtctgacatctga
ggactctgcagtctattactgtgcaagatcggtcggccctatggactactggggtcaaggaacctcagtcaccgtctcttctgatcagg
agcccaaatcttgtgacaaaactcacacatccccaccgtcctcagcacctgaactcctggggggaccgtcagtcttcctcttcccccc
aaaacccaaggacaccctcatgatctcccggacccctgaggtcacatgcgtggtggtggacgtgagccacgaagaccctgaggtc
aagcaactggtacgtggacggcgtggaggtgcataatgccaagacaaagccgcgggaggagcagtacaacagcacgtaccgt
gtggcagcgtcctcaccgtcctgcaccaggactggctgaatggcaaggagtacaagtgcaaggtctccaacaaagccctcccagc
ccccatcgagaaaacaatctccaaagccaaagggcagccccgagaaccacaggtgtacaccctgcccccatcccgggatgagct
gaccaagaaccaggtcagcctgacctgcctggtcaaaggcttctatcccagcgacatcgccgtggagtgggagagcaatgggcag
ccggagaacaactacaagaccacgcctcccgtgctggactccgacggctccttcttcctctacagcaagctcaccgtggacaagag
caggtggcagcaggggaacgtcttctcatgctccgtgatgcatgaggctctgcacaaccactacacgcagaagagcctctccctgtc
tccgggtaaatgatctaga
Amino acid sequence:
mvstaqflgllllwhggrcdiqmtqspaslsasvgetvtitcrtsenvysylawyqqkqgkspqllvsfaktlaegvpsrfsgsgs
gtqfslkisslqpedsgsyfcqhhsdnpwtfgggteleikggggsggggsggggssavqlqqsgpesekpgasvkisckasgys
ftgynmnwvkqnngkslewignidpyyggnynrklikgkatltvdkssstaymqlksltsedsavyycarsvgpmdywgqg
tsvtvssdqepkscdkthtsppssapellggpsvflfppkpkdtlmisrtpevtcvvvdvshedpevkfnwyvdgvevhnakt
kpreeqynstyrvvsvltvlhqdwlngkeykckvsnkalpapiektiskakgqprepqvytlppsrdeltknqvsltclvkgfyp
sdiavewesngqpennykttppvldsdgsfflyskltvdksrwqqgnvfscsvmhealhnhytqkslslspgk
53. G28-1 scFv VH L11S (CSC-S)H WCH2 WCH3
Nucleotide sequence:
aagcttgccgccatggtatccacagctcagttccttgggttgctgctgctgtggcttacaggtggcagatgtgacatccagatgactca
gtctccagcctccctatctgcatctgtgggagagactgtcaccatcacatgtcgaacaagtgaaaatgtttacagttatttggcttggtat
cagcagaaacagggaaaatctcctcagctcctggtctcttttgcaaaaaccttagcagaaggtgtgccatcaaggttcagtggcagtg
gatcaggcacacagttttctctgaagatcagcagcctgcagcctgaagattctggaagttatttctgtcaacatcattccgataatccgtg
gacgUcggtggaggcaccgaactggagatcaaaggtggcggtggctcgggcggtggtgggtcgggtggcggcggatcgtcag
cggtccagctgcagcagtctggacctgagtcggaaaagcctggcgcttcagtgaagatttcctgcaaggcttctggttactcattcact
ggctacaatatgaactgggtgaagcagaataatggaaagagccttgagtggattggaaatattgatccttattatggtggtactacctac
aaccggaagttcaagggcaaggccacattgactgtagacaaatcctccagcacagcctacatgcagctcaagagtctgacatctga
ggactctgcagtctattactgtgcaagatcggtcggccctatggactactggggtcaaggaacctcagtcaccgtctcttctgatcagg
agcccaaatcttgtgacaaaactcacacatctccaccgtgctcagcacctgaactcctgggtggaccgtcagtcttcctcttcccccca
aaacccaaggacaccctcatgatctcccggacccctgaggtcacatgcgtggtggtggacgtgagccacgaagaccctgaggtca
agttcaactggtacgtggacggcgtggaggtgcataatgccaagacaaagccgcgggaggagcagtacaacagcacgtaccgtgt
ggtcagcgtcctcaccgtcctgcaccaggactggctgaatggcaaggagtacaagtgcaaggtctccaacaaagccctcccagcc
cccatcgagaaaacaatctccaaagccaaagggcagccccgagaaccacaggtgtacaccctgcccccatcccgggatgagctg
accaagaaccaggtcagcctgacctgcctggtcaaaggcttctatccaagcgacatcgccgtggagtgggagagcaatgggcagc
cggagaacaactacaagaccacgcctcccgtgctggactccgacggctccttcttcctctacagcaagctcaccgtggacaagagc
aggtggcagcaggggaacgtcttctcatgctccgtgatgcatgaggctctgcacaaccactacacgcagaagagcctctccctgtct
ccgggtaaatgatctaga
Amino acid sequence:
rnvstaqflgllllwltggrcdiqmtqspaslsasvgetvtitcrtsenvysylawyqqkqgkspqllvsfaktlaegvpsrfsgsgs
gtqfslkisslqpedsgsyfcqhhsdnpwtfgggteleikggggsggggsggggssavqlqqsgpesekpgasvkisckasgys
ftgynmnwvkqnngkslewignidpyyggttynrkfkgkatltvdkssstaymqlksltsedsavyycarsvgpmdywgqg
tsvtvssdqepkscdkthtsppcsapellggpsvflfjpkpkdtlmisrtpevtcvvvdvshedpevkfnwyvdgvevhnakt
kpreeqynstyrvvsvltvlhqdwlngkeykckvsnkalpapiektiskakgqprepqvytlppsrdeltknqvsltclvkgfyp
sdiavewesngqpennykttppvldsdgsfflyskltvdksrwqqgnvfscsvmhealhnhytqkslslspgk
54. G28-1 scFv VH L11S (SSC-P)H WCH2 WCH3
Nucleotide sequence:
aagcttgccgccatggtatccacagctcagttccttgggttgctgctgctgtggcttacaggtggcagatgtgacatccagatgactca
gtctccagcctccctatctgcatctgtgggagagactgtcaccatcacatgtcgaacaagtgaaaatgtttacagttatttggcttggtat
cagcagaaacagggaaaatctcctcagctcctggtctcttttgcaaaaaccttagcagaaggtgtgccatcaaggttcagtggcagtg
gatcaggcacacagttttctctgaagatcagcagcctgcagcctgaagattctggaagttatttctgtcaacatcattccgataatccgtg
gacgttcggtggaggcaccgaactggagatcaaaggtggcggtggctcgggcggtggtgggtcgggtggcggcggatcgtcag
cggtccagctgcagcagtctggacctgagtcggaaaagcctggcgcttcagtgaagatttcctgcaaggcttctggttactcattcact
ggctacaatatgaactgggtgaagcagaataatggaaagagccttgagtggattggaaatattgatccttattatggtggtactacctac
aaccggaagttcaagggcaaggccacattgactgtagacaaatcctccagcacagcctacatgcagctcaagagtctgacatctga
ggactctgcagtctattactgtgcaagatcggtcggccctatggactactggggtcaaggaacctcagtcaccgtctcttctgatcagg
agcccaaatcttctgacaaaactcacacatccccaccgtgcccagcacctgaactcctggggggaccgtcagtcttcctcttcccccc
aaaacccaaggacaccctcatgatctcccggacccctgaggtcacatgcgtggtggtggacgtgagccacgaagaccctgaggtc
aagttcaactggtacgtggacggcgtggaggtgcataatgccaagacaaagccgcgggaggagcagtacaacagcacgtaccgt
gtggtcagcgtcctcaccgtcctgcaccaggactggctgaatggcaaggagtacaagtgcaaggtctccaacaaagccctcccagc
ccccatcgagaaaacaatctccaaagccaaagggcagccccgagaaccacaggtgtacaccctgcccccatcccgggatgagct
gaccaagaaccaggtcagcctgacctgcctggtcaaaggcttctatcccagcgacatcgccgtggagtgggagagcaatgggcag
ccggagaacaactacaagaccacgcctcccgtgctggactccgacggctccttcttcctctacagcaagctcaccgtggacaagag
caggtggcagcaggggaacgtcttctcatgctccgtgatgcatgaggctctgcacaaccactacacgcagaagagcctctccctgtc
tccgggtaaatgatctaga
Amino acid sequence:
mvstaqflgllllwltggrcdiqmtqspaslsasvgetvtitcrtsenvysylawyqqkqgkspqllvsfaktlaegvpsrfsgsgs
gtqfslkisslqpedsgsyfcqhhsdnpwtfgggteleikggggsggggsggggssavqlqqsgpesekpgasvkisckasgys
ftgynmnwvkqnngkslewignidpyyggttynrkfkgkatltvdkssstaymqlksltsedsavyycarsvgpmdywgqg
tsvtvssdqepkssdkthtsppcpapellggpsvflfppkpkdtlmisrtpevtcvvvdvshedpevkfnwyvdgvevhnakt
kpreeqynstyrvvsvltvlhqdwlngkeykckvsnkalpapiektiskakgqprepqvytlppsrdeltknqvsltclvkgfyp
sdiavewesngqpennykttppvldsdgsfflyskltvdksrwqqgnvfscsvmhealhnhytqkslslspgk
II. 54. HCTLA4 HIGG1 (SSS-S)H P238SCH2 WCH3
Nucleotide sequence:
atggcttgccttggatttcagcggcacaaggctcagctgaacctggctgccaggacctggccctgcactctcctgttttttcttctcttcat
ccctgtcttctgcaaagcaatgcacgtggcccagcctgctgtggtactggccagcagccgaggcatcgccagctttgtgtgtgagtat
gcatctccaggcaaagccactgaggtccgggtgacagtgcttcggcaggctgacagccaggtgactgaagtctgtgcggcaacct
acatgacggggaatgagttgaccttcctagatgattccatctgcacgggcacctccagtggaaatcaagtgaacctcactatccaagg
actgagggccatggacacgggactctacatctgcaaggtggagctcatgtacccaccgccatactacctgggcataggcaacggaa
cccagatttatgtaattgatccagaaccgtgcccagattctgatcaacccaaatcttctgacaaaactcacacatccccaccgtcctcag
cacctgaactcctggggggatcgtcagtcttcctcttccccccaaaacccaaggacaccctcatgatctcccggacccctgaggtcac
atgcgtggtggtggacgtgagccacgaagaccctgaggtcaagttcaactggtacgtggacggcgtggaggtgcataatgccaag
acaaagccgcgggaggagcagtacaacagcacgtaccgtgtggtcagcgtcctcaccgtcctgcaccaggactggctgaatggca
aggagtacaagtgcaaggtctccaacaaagccctcccagcccccatcgagaaaacaatctccaaagccaaagggcagccccgag
aaccacaggtgtacaccctgcccccatcccgggatgagctgaccaagaaccaggtcagcctgacctgcctggtcaaaggcttctat
cccagcgacatcgccgtggagtgggagagcaatgggcagccggagaacaactacaagaccacgcctcccgtgctggactccga
cggctccttcttcctctacagcaagctcaccgtggacaagagcaggtggcagcaggggaacgtcttctcatgctccgtgatgcatga
ggctctgcacaaccactacacgcagaagagcctctccctgtctccgggtaaatga
Amino acid sequence:
maclgfqrhkaqlnlaartwpctllffllfipvfckamhvaqpavvlassrgiasfvceyaspgkatevrvtvlrqadsqvtevcaa
tymtgneltflddsictgtssgnqvnltiqglramdtglyickvelmypppyylgigngtqiyvidpepcpdsdqpkssdkthts
ppssapellggssvflfppkpkdtlmisrtpevtcvvvdvshedpevkfhwyvdgvevhnaktkpreeqynstyrvvsvltvlh
qdwlngkeykckvsnkalpapiektiskakgciprepqvytlppsrdeltknqvsltclvkgfypsdiavewesngqpennykt
tppvldsdgsfflyskltvdksrwqqgnvfscsvmhealhnhytqkslslspgk*
55. Fc2-2 VL
Nucleotide sequence:
gttgttaagcttgccgccatggattcacaggcccaggttcttatgttactgctgctatgggtatctggtacctgtggggacattgtgatgt
cacagtctccatcctccctagctgtgtcagttggagagaaggtttctatgagctgcaagtccagtcagagccttttatataatcacaatca
aaagaactacttggcctggtaccagcagataccagggcagtctcctaaactgctgatttactgggcatccactagggaatctggggtc
cctgatcgcttcacaggcagtggatctgggacagatttcactctcaccatcagcagagtgaaggctgaagacctggcagtttattactg
tcagcaatattatacctatcctcccacgttcggaggtggcaccaagctggaaataaaaggtggcggtggctcgggcggtggtgggtc
gggtggcggcgggagctcg
Amino acid sequence:
mdsqaqvlmllllwvsgtcgdivmsqspsslavsvgekvsmsckssqsllynhnqknylawyqqipgqspklliywastres
gvpdrftgsgsgtdftltisrvkaedlavyycqqyytypptfgggtkleikggggsggggsggggss
56. FC2-2VH
Nucleotide sequence:
Gggagctcgcaggtgcagttgaaggagtcaggacctggcctggtggcgccctcacagagcctgtccatcacatgcaccgtctcag
ggttctcattaaccgtctatggtgttaactgggttcgccagcctccaggaaagggtctggactggctgggaatgatatggggtgatgg
aagcacagactataattcagctctcaaatccagactgagcatcagtaaggacaactccaagagccaagttttcttaaaaatggacagtc
tacaaactgatgacacagccaggtactactgtgccagagatcactatggtacccactatgctatggactactggggtcaaggaacctc
agtcaccgtctcctctgatcag
Amino acid sequence:
gssqvqlkesgpglvapsqslsitctvsgfsltvygvnwvrqppgkgldwlgmiwgdgstdynsalksrlsiskdnsksqvflk
mdslqtddtaryycardhygthyamdywgqgtsvtvssdq
57. FC2-2scFv
Nucleotide sequence:
gttgttaagcttgccgccatggattcacaggcccaggttcttatgttactgctgctatgggtatctggtacctgtggggacattgtgatgt
cacagtctccatcctccctagctgtgtcagttggagagaaggtttctatgagctgcaagtccagtcagagccttttatataatcacaatca
aaagaactacttggcctggtaccagcagataccagggcagtctcctaaactgctgatttactgggcatccactagggaatctggggtc
cctgatcgcttcacaggcagtggatctgggacagatttcactctcaccatcagcagagtgaaggctgaagacctggcagtttattactg
tcagcaatattatacctatcctcccacgttcggaggtggcaccaagctggaaataaaaggtggcggtggctcgggcggtggtgggtc
gggtggcggcgggagctctcaggtgcagttgaaggagtcaggacctggcctggtggcgccctcacagagcctgtccatcacatgc
accgtctcagggttctcattaaccgtctatggtgttaactgggttcgccagcctccaggaaagggtctggactggctgggaatgatatg
gggtgatggaagcacagactataattcagctctcaaatccagactgagcatcagtaaggacaactccaagagccaagttttcttaaaa
atggacagtctacaaactgatgacacagccaggtactactgtgccagagatcactatggtacccactatgctatggactactggggtc
aaggaacctcagtcaccgtctcctctgatcag
Amino acid sequence:
mdsqaqvlmllllwvsgtcgdivmsqspsslavsvgekvsmsckssqsllynhnqknylawyqqipgqspklliywastres
vpdrftgsgsgtdftltisrvkaedlavyycqqyytypptfgggtkleikggggsggggsggggssqvqlkesgpglvapsqsl
sitctvsgfsltvygvnwvrqppgkgldwlgmiwgdgstdynsalksrlsiskdnsksqvflkmdslqtddtaryycardhygt
hyamdywgqgtsvtvssdq
58. FC2-2 VHL11S
Nucleotide sequence:
gggagctctcaggtgcagttgaaggagtcaggacctggctcggtggcgccctcacagagcctgtccatcacatgcaccgtctcagg
gttctcattaaccgtctatggtgttaactgggttcgccagcctccaggaaagggtctggactggctgggaatgatatggggtgatgga
agcacagactataattcagctctcaaatccagactgagcatcagtaaggacaactccaagagccaagttttcttaaaaatggacagtct
acaaactgatgacacagccaggtactactgtgccagagatcactatggtacccactatgctatggactactggggtcaaggaacctca
gtcaccgtctcctctgatcag
Amino acid sequence:
(gss)qvqlkesgpgsvapsqslsitctvsgfsltvygvnwvrqppgkgldwlgmiwgdgstdynsalksrlsiskdnsksqvfl
kmdslqtddtaryycardhygthyamdywgqgtsvtvssdq
59. FC2-2 VH L11S scFv
Nucleotide sequence:
gttgttaagcttgccgccatggattcacaggcccaggttcttatgttactgctgctatgggtatctggtacctgtggggacattgtgatgt
cacagtctccatcctccctagctgtgtcagttggagagaaggtttctatgagctgcaagtccagtcagagccttttatataatcacaatca
aaagaactacttggcctggtaccagcagataccagggcagtctcctaaactgctgatttactgggcatccactagggaatctggggtc
cctgatcgcttcacaggcagtggatctgggacagatttcactctcaccatcagcagagtgaaggctgaagacctggcagtttattactg
tcagcaatattatacctatcctcccacgttcggaggtggcaccaagctggaaataaaaggtggcggtggctcgggcggtggtgggtc
gggtggcggcgggagctctcaggtgcagttgaaggagtcaggacctggctcggtggcgccctcacagagcctgtccatcacatgc
accgtctcagggttctcattaaccgtctatggtgttaactgggttcgccagcctccaggaaagggtctggactggctgggaatgatatg
gggtgatggaagcacagactataattcagctctcaaatccagactgagcatcagtaaggacaactccaagagccaagttttcttaaaa
atggacagtctacaaactgatgacacagccaggtactactgtgccagagatcactatggtacccactatgctatggactactggggtc
aaggaacctcagtcaccgtctcctctgatcag
Amino acid sequence:
Mdsqaqvlmllllwvsgtcgdivmsqspsslavsvgekvsmsckssqsllynhnqknylawyqqipgqspklliywastres
gvpdrftgsgsgtdftltisrvkaedlavyycqqyytypptfgggtkleikggggsggggsggggssqvqlkesgpgsvapsqsl
sitctvsgfsltvygvnwvrqppgkgldwlgmiwgdgstdynsalksrlsiskdnsksqvflkmdslqtddtaryycardhygt
hyamdywgqgtsvtvssdq
60. FC2-2 (SSS-S)H WCH2 WCH3
Nucleotide sequence:
gttgttaagcttgccgccatggattcacaggcccaggttcttatgttactgctgctatgggtatctggtacctgtggggacattgtgatgt
cacagtctccatcctccctagctgtgtcagttggagagaaggtttctatgagctgcaagtccagtcagagccttttatataatcacaatca
aaagaactacttggcctggtaccagcagataccagggcagtctcctaaactgctgatttactgggcatccactagggaatctggggtc
cctgatcgcttcacaggcagtggatctgggacagatttcactctcaccatcagcagagtgaaggctgaagacctggcagtttattactg
tcagcaatattatacctatcctcccacgttcggaggtggcaccaagctggaaataaaaggtggcggtggctcgggcggtggtgggtc
gggtggcggcgggagctctcaggtgcagttgaaggagtcaggacctggcctggtggcgccctcacagagcctgtccatcacatgc
accgtctcagggttctcattaaccgtctatggtgttaactgggttcgccagcctccaggaaagggtctggactggctgggaatgatatg
gggtgatggaagcacagactataattcagctctcaaatccagactgagcatcagtaaggacaactccaagagccaagttttcttaaaa
atggacagtctacaaactgatgacacagccaggtactactgtgccagagatcactatggtacccactatgctatggactactggggtc
aaggaacctcagtcaccgtctcctctgatcaggagcccaaatcttctgacaaaactcacacatccccaccgtcctcagcacctgaact
cctgggtggaccgtcagtcttcctcttccccccaaaacccaaggacaccctcatgatctcccggacccctgaggtcacatgcgtggtg
gtggacgtgagccacgaagaccctgaggtcaagttcaactggtacgtggacggcgtggaggtgcataatgccaagacaaagccgc
gggaggagcagtacaacagcacgtaccgtgtggtcagcgtcctcaccgtcctgcaccaggactggctgaatggcaaggagtacaa
gtgcaaggtctccaacaaagccctcccagcccccatcgagaaaaccatctccaaagccaaagggcagccccgagaaccacaggt
gtacaccctgcccccatcccgggatgagctgaccaagaaccaggtcagcctgacctgcctggtcaaaggcttctatccaagcgaca
tcgccgtggagtgggagagcaatgggcagccggagaacaactacaagaccacgcctcccgtgctggactccgacggctccttctt
cctctacagcaagctcaccgtggacaagagcaggtggcagcaggggaacgtcttctcatgctccgtgatgcatgaggctctgcaca
accactacacgcagaagagcctctccctgtctccgggtaaatgatctaga
Amino acid sequence:
mdsqaqvlmllllwvsgtcgdivmsqspsslavsvgekvsmsckssqsllynhnqknylawyqqipgqspklliywastres
gvpdrftgsgsgtdfthisrvkaedlavyycqqyytypptfgggtkleikggggsggggsggggssqvqlkesgpglvapsqsl
sitctvsgfslivygvnwvrqppgkgldwlgmiwgdgstdynsalksrlsiskdnsksqvflkmdslqtddtaryycardhygt
hyamdywgqgtsvtvssdqepkssdkthtsppssapellggpsvflfppkpkdtlmisrtpevtcvvvdvshedpevkfnwy
vdgvevhnaktkpreeqynstyrvvsvltvlhqdwlngkeykckvsnkalpapiektiskakgqprepqvytlppsrdeltkn
qvsltclvkgfypsdiavewesngpennykttppvldsdgsttlyskltvdksrwqqgnvfscsvmhealhnhytqkslslsp
gk
61. FC2-2 VHL11S (SSS-S)H WCH2 WCH3
Nucleotide sequence:
gttgttaagcttgccgccatggattcacaggcccaggttcttatgttactgctgctatgggtatctggtacctgtggggacattgtgatgt
cacagtctccatcctccctagctgtgtcagttggagagaaggtttctatgagctgcaagtccagtcagagccttttatataatcacaatca
aaagaactacttggcctggtaccagcagataccagggcagtctcctaaactgctgatttactgggcatccactagggaatctggggtc
cctgatcgcttcacaggcagtggatctgggacagatttcactctcaccatcagcagagtgaaggctgaagacctggcagtttattactg
tcagcaatattatacctatcctcccacgttcggaggtggcaccaagctggaaataaaaggtggcggtggctcgggcggtggtgggtc
gggtggcggcgggagctctcaggtgcagttgaaggagtcaggacctggctcggtggcgccctcacagagcctgtccatcacatgc
accgtctcagggttctcattaaccgtctatggtgttaactgggttcgccagcctccaggaaagggtctggactggctgggaatgatatg
gggtgatggaagcacagactataattcagctctcaaatccagactgagcatcagtaaggacaactccaagagccaagttttcttaaaa
atggacagtctacaaactgatgacacagccaggtactactgtgccagagatcactatggtacccactatgctatggactactggggtc
aaggaacctcagtcaccgtctcctctgatcaggagcccaaatcttctgacaaaactcacacatccccaccgtcctcagcacctgaact
cctgggtggaccgtcagtcttcctcttccccccaaaacccaaggacaccctcatgatctcccggacccctgaggtcacatgcgtggtg
gtggacgtgagccacgaagaccctgaggtcaagttcaactggtacgtggacggcgtggaggtgcataatgccaagacaaagccgc
gggaggagcagtacaacagcacgtaccgtgtggtcagcgtcctcaccgtcctgcaccaggactggctgaatggcaaggagtacaa
gtgcaaggtctccaacaaagccctcccagcccccatcgagaaaaccatctccaaagccaaagggcagccccgagaaccacaggt
gtacaccctgcccccatcccgggatgagctgaccaagaaccaggtcagcctgacctgcctggtcaaaggcttctatccaagcgaca
tcgccgtggagtgggagagcaatgggcagccggagaacaactacaagaccacgcctcccgtgctggactccgacggctccttctt
cctctacagcaagctcaccgtggacaagagcaggtggcagcaggggaacgtcttctcatgctccgtgatgcatgaggctctgcaca
accactacacgcagaagagcctctccctgtctccgggtaaatgatctaga
Amino acid sequence:
mdsqaqvlmllllwvsgtcgdivmsqspsslavsvgekvsmsckssqsllynhnqknylawyqqipgqspklliywastres
gvpdrftgsgsgtdftltisrvkaedlavyycqqyytypptfgggtkleikggggsggggsggggssqvqlkesgpgsvapsqsl
sitctvsgfsltvygvnwvrqppgkgldwlgmiwgdgstdynsalksrlsiskdnsksqvflkmdslqtddtaryycardhygt
hyamdywgqgtsvtvssdqepkssdkthtsppssapellggpsvflfppkpkdtlmisrtpevtcvvvdvshedpevkfnwy
vdgvevhnaktkpreeqynstyrvvsvltvlhqdwlngkeykckvsnkalpapiektiskakgqprepqvytlppsrdeltkn
qvsltclvkgfypsdiavewesngqpennykttppvldsdgsttlyskltvdksrwqqgnvfscsvmhealhnhytqkslslsp
gk
62. UCHL-1 VH
Nucleotide sequence:
atgggcaggcttacttcttcattcctgctactgattgttcctgcatatgtcctctcccagattactctgaaagagtctggccctgggatcttg
cagccctcccagaccctcagtctgacttgttctttctctgggttttcactgaccacttatggtataggagtaggttggattcgtcagcctcc
agggaagggtctggagtggctgacacacatttggtggaatgataataagtactataacacagccctgaggagccggctcacaatctc
caaggattcctccaacaaccaagtactcctcaagatcgccaatgtggacactgcagataccgccacatactactgtctctacggctac
acttactggggccaagggactctggtcactgtctctgca
Amino acid sequence:
mgrltssflhlivpayvlsqitlkesgpgilqpsqtlsltcsfsgfslttygigvgwirqppgkglewlthiwwndnkyyntalrsrlti
skdssnnqvllkianvdtadtatyyclygytywgqgtlvtvsa
63. UCHL-1 VL
Nucleotide sequence:
atgaagttgcctgttaggctgttggtgctgatgttctggattcctgcttccatcagtgatgttgtgatgacccaaactccactctccctgcc
tgtcagtcttggagatcaggcctccatctcttgcagatctagtcagagccttctttacagtaatggaaacacctatttacattggtacctgc
agaagccaggccagtctccaaaactcctgatctacaaactttccaaccgattttctggggtcccagacaggttcagtggcagtggatc
agggacagatttcacactcaagatcagcagagtggaggctgaggatctgggagtttatttctgctctcaaagtacacatgttccgtgga
cgttcggtggaggcaccaagctggaaatcaaa
Amino acid sequence:
mklpvrllvlmfwipasisdvvmtqtplslpvslgdqasiscrssqsllysngntylhwylqkpgqspklliyklsnrfsgvpdrf
sgsgsgtdftlkisrveaedlgvyfcsqsthvpwtfgggtkleik
64. UCHL-1 scFv
Nucleotide sequence:
gttgttaagcttgccgccatgaagttgcctgttaggctgttggtgctgatgttctggattcctgcttccatcagtgatgttgtgatgaccca
aactccactctccctgcctgtcagtcttggagatcaggcctccatctcttgcagatctagtcagagccttctttacagtaatggaaacacc
tatttacattggtacctgcagaagccaggccagtctccaaaactcctgatctacaaactttccaaccgattttctggggtcccagacagg
ttcagtggcagtggatcagggacagatttcacactcaagatcagcagagtggaggctgaggatctgggagtttatttctgctctcaaa
gtacacatguccgtggacgttcggtggaggcaccaagctggaaatcaaagatggcggtggctcgggcggtggtggatctggagg
aggtgggagctctcagattactctgaaagagtctggccctgggatcttgcagccctcccagaccctcagtctgacttgttctttctctgg
gttttcactgaccacttatggtataggagtaggttggattcgtcagcctccagggaagggtctggagtggctgacacacatttggtgga
atgataataagtactataacacagccctgaggagccggctcacaatctccaaggattcctccaacaaccaagtactcctcaagatcgc
caatgtggacactgcagataccgccacatactactgtctctacggctacacttactggggccaagggactctggtcactgtctctgctg
atca
Amino acid sequence:
mklpvrllvlmfwipasisdvvmtqtplslpvslgdqasiscrssqsllysngntylhwylqkpgqspklliyklsnrfsgvpdrf
sgsgsgtdftlkisrveaedlgvyfcsqsthvpwtfgggtkleikdgggsggggsggggssqitlkesgpgilqpsqtlsltcsfsgf
slttygigvgwirqppgkglewlthiwwndnkyyntalrsrltiskdssnnqvllkianvdtadtatyyclygytywgqgtlvtvs
ad
65. UCHL-1 VH I11SL12S
Nucleotide sequence:
gggagctctcagattactctgaaagagtctggccctgggatcttgcagccctcccagaccctcagtctgacttgttctttctctgggtttt
cactgaccacttatggtataggagtaggttggattcgtcagcctccagggaagggtctggagtggctgacacacatttggtggaatga
taataagtactataacacagccctgaggagccggctcacaatctccaaggattcctccaacaaccaagtactcctcaagatcgccaat
gtggacactgcagataccgccacatactactgtctctacggctacacttactggggccaagggactctggtcactgtctctgctgatca
Amino acid sequence:
(gss)qitlkesgpgssqpsqtlsltcsfsgfslttygigvgwirqppgkglewlthiwwndnkyyntalrsrltiskdssnnqvllki
anvdtadtatyyclygytywgqgtlvtvsad
66. UCHL-1 scFv VH L11S
Nucleotide sequence:
gttgttaagcttgccgccatgaagttgcctgttaggctgttggtgctgatgttctggattcctgcttccatcagtgatgttgtgatgaccca
aactccactctccctgcctgtcagtcttggagatcaggcctccatctcttgcagatctagtcagagccttctttacagtaatggaaacacc
tatttacattggtacctgcagaagccaggccagtctccaaaactcctgatctacaaactttccaaccgattttctggggtcccagacagg
ttcagtggcagtggatcagggacagatttcacactcaagatcagcagagtggaggctgaggatctgggagtttatttctgctctcaaa
gtacacatgttccgtggacgttcggtggaggcaccaagctggaaatcaaagatggcggtggctcgggcggtggtggatctggagg
aggtgggagctctcagattactctgaaagagtctggccctgggagctcccagccctcccagaccctcagtctgacttgttctttctctg
ggttttcactgaccacttatggtataggagtaggttggattcgtcagcctccagggaagggtctggagtggctgacacacatttggtgg
aatgataataagtactataacacagccctgaggagccggctcacaatctccaaggattcctccaacaaccaagtactcctcaagatcg
ccaatgtggacactgcagataccgccacatactactgtctctacggctacacttactggggccaagggactctggtcactgtctctgct
gatca
Amino acid sequence:
mklpvrllvlmfwipasisdvvmtqtplslpvslgdqasiscrssqsllysngntylhwylqkpgqspklliyklsnrfsgvpdrf
sgsgsgtdftlkisrveaedlgvyfcsqsthvpwtfgggtkleikdgggsggggsggggssqitlkesgpgssqpsqtlsltcsfsgf
slttygigvgwirqppgkglewlthiwwndnkyyntalrsrltiskdssnnqvllkianvdtadtatyyclygytywgqgtlvtvs
ad
67. UCHL-1 scFv (SSS-S)H WCH2 WCH3
Nucleotide sequence:
gttgttaagcttgccgccatgaagttgcctgttaggctgttggtgctgatgttctggattcctgcttccatcagtgatgttgtgatgaccca
aactccactctccctgcctgtcagtcttggagatcaggcctccatctcttgcagatctagtcagagccttctttacagtaatggaaacacc
tatttacattggtacctgcagaagccaggccagtctccaaaactcctgatctacaaactttccaaccgattttctggggtcccagacagg
ttcagtggcagtggatcagggacagatttcacactcaagatcagcagagtggaggctgaggatctgggagtttatttctgctctcaaa
gtacacatgttccgtggacgttcggtggaggcaccaagctggaaatcaaagatggcggtggctcgggcggtggtggatctggagg
aggtgggagctctcagattactctgaaagagtctggccctgggatcttgcagccctcccagaccctcagtctgacttgttctttctctgg
gttttcactgaccacttatggtataggagtaggttggattcgtcagcctccagggaagggtctggagtggctgacacacatttggtgga
atgataataagtactataacacagccctgaggagccggctcacaatctccaaggattcctccaacaaccaagtactcctcaagatcgc
caatgtggacactgcagataccgccacatactactgtctctacggctacacttactggggccaagggactctggtcactgtctctgctg
atcaggagcccaaatcttctgacaaaactcacacatccccaccgtcctcagcacctgaactcctgggtggaccgtcagtcttcctcttc
cccccaaaacccaaggacaccctcatgatctcccggacccctgaggtcacatgcgtggtggtggacgtgagccacgaagaccctg
aggtcaagttcaactggtacgtggacggcgtggaggtgcataatgccaagacaaagccgcgggaggagcagtacaacagcacgt
accgtgtggtcagcgtcctcaccgtcctgcaccaggactggctgaatggcaaggagtacaagtgcaaggtctccaacaaagccctc
ccagcccccatcgagaaaaccatctccaaagccaaagggcagccccgagaaccacaggtgtacaccctgcccccatcccgggat
gagctgaccaagaaccaggtcagcctgacctgcctggtcaaaggcttctatccaagcgacatcgccgtggagtgggagagcaatg
ggcagccggagaacaactacaagaccacgcctcccgtgctggactccgacggctccttcttcctctacagcaagctcaccgtggac
aagagcaggtggcagcaggggaacgtcttctcatgctccgtgatgcatgaggctctgcacaaccactacacgcagaagagcctctc
cctgtctccgggtaaatgatctaga
Amino acid sequence:
mklpvrllvlmfwipasisdvvmtqtplslpvslgdqasiscrssqsllysngntylhwylqkpgqspklliyklsnrfsgvpdrf
sgsgsgtdttlkisrveaedlgvyfcsqsthvpwtfgggtkleikdgggsggggsggggssqitlkesgpgilqpsqtlsltcsfsgf
slttygigvgwirqppgkglewlthiwwndnkyyntalrsrltiskdssnnqvllkianvdtadtatyyclygytywgqgtlvtvs
adqepkssdkthtsppssapellggpsvflfppkpkdtlmisrtpevtcvvvdvshedpevkfnwyvdgvevhnaktkpreeq
ynstyrvvsvltvlhqdwlngkeykckvsnkalpapiektiskakgqprepqvytlppsrdeltknqvsltclvkgfypsdiave
wesngqpennykttppvldsdgsttlyskltvdksrwqqgnvfscsvmhealhnhytqkslslspgk
68. UCHL-1 scFv VHL11S (SSS-S)H WCH2 WCH3
Nucleotide sequence:
gttgttaagcttgccgccatgaagttgcctgttaggctgttggtgctgatgttctggattcctgcttccatcagtgatgttgtgatgaccca
aactccactctccctgcctgtcagtcttggagatcaggcctccatctcttgcagatctagtcagagccttctttacagtaatggaaacacc
tatttacattggtacctgcagaagccaggccagtctccaaaactcctgatctacaaactttccaaccgattttctggggtcccagacagg
ttcagtggcagtggatcagggacagatttcacactcaagatcagcagagtggaggctgaggatctgggagtttatttctgctctcaaa
gtacacatgttccgtggacgttcggtggaggcaccaagctggaaatcaaagatggcggtggctcgggcggtggtggatctggagg
aggtgggagctctcagattactctgaaagagtctggccctgggagctcccagccctcccagaccctcagtctgacttgttctttctctg
ggttttcactgaccacttatggtataggagtaggttggattcgtcagcctccagggaagggtctggagtggctgacacacatttggtgg
aatgataataagtactataacacagccctgaggagccggctcacaatctccaaggattcctccaacaaccaagtactcctcaagatcg
ccaatgtggacactgcagataccgccacatactactgtctctacggctacacttactggggccaagggactctggtcactgtctctgct
gatcaggagcccaaatcttctgacaaaactcacacatccccaccgtcctcagcacctgaactcctgggtggaccgtcagtcttcctctt
ccccccaaaacccaaggacaccctcatgatctcccggacccctgaggtcacatgcgtggtggtggacgtgagccacgaagaccct
gaggtcaagttcaactggtacgtggacggcgtggaggtgcataatgccaagacaaagccgcgggaggagcagtacaacagcacg
taccgggtcagcgtcctcaccgtcctgcaccaggactggctgaatggcaaggagtacaagtgcaaggtctccaacaaagccct
cccagcccccatcgagaaaaccatctccaaagccaaagggcagccccgagaaccacaggtgtacaccctgcccccatcccggga
tgagctgaccaagaaccaggtcagcctgacctgcctggtcaaaggcttctatccaagcgacatcgccgtggagtgggagagcaatg
ggcagccggagaacaactacaagaccacgcctcccgtgctggactccgacggctccttcttcctctacagcaagctcaccgtggac
aagagcaggtggcagcaggggaacgtcttctcatgctccgtgatgcatgaggctctgcacaaccactacacgcagaagagcctctc
cctgtctccgggtaaatgatctagaa
Amino acid sequence:
mklpvrllvlmfwipasisdvvmtqtplslpvslgdqasiscrssqsllysngntylhwylqkpgqspklliyklsnrfsgvpdrf
sgsgsgtdftlkisrveaedlgvyfcsqsthvpwtfgggtkleikdgggsggggsggggssqitlkesgpgssqpsqtlsltcsfsgf
slttygigvgwirqppgkglewlthiwwndnkyyntalrsrltiskdssnnqvllkianvdtadtatyyclygytywgqgtlvtvs
adqepkssdkthtsppssapellggpsvflfppkpkdtlmisrtpevtcvvvdvshedpevkfnwyvdgvevhnaktkpreeq
ynstyrvvsvltvlhqdwlngkeykckvsnkalpapiektiskakgqprepqvytlppsrdeltknqvsltclvkgfypsdiave
wesngqpennykttppvldsdgsttlyskltvdksrwqqgnvfscsvmhealhnhytqkslslspgk
69. 5B9 VH
Nucleotide sequence:
atggctgtcttggggctgctcttctgcctggtgacatttccaagctgtgtcctatcccaggtgcagctgaagcagtcaggacctggcct
agtgcagtcctcacagagcctgtccatcacctgcacagtctctggtttctcattaactacctatgctgtacactgggttcgccagtctcca
ggaaagggtctggagtggctgggagtgatatggagtggtggaatcacagactataatgcagctttcatatccagactgagcatcacc
aaggacgattccaagagccaagttttctttaaaatgaacagtctgcaacctaatgacacagccatttattactgtgccagaaatgggggt
gataactacccttattactatgctatggactactggggtcaaggaacctcagtcaccgtctcctca
Amino acid sequence:
mavlgllfclvtfpscvlsqvqlkqsgpglvqssqslsitctvsgfslttyavhwvrqspgkglewlgviwsggitdynaafisrlsi
tkddsksqvttkmnslqpndtaiyycarnggdnypyyyamdywgqgtsvtvss
70. 5B9 VL
Nucleotide sequence:
atgaggttctctgctcagcttctggggctgcttgtgctctggatccctggatccactgcagatattgtgatgacgcaggctgcattctcca
atccagtcactcttggaacatcagcttccatctcctgcaggtctagtaagagtctcctacatagtaatggcatcacttatttgtattggtatc
tgcagaagccaggccagtctcctcagctcctgatttatcagatgtccaaccttgcctcaggagtcccagacaggttcagtagcagtgg
gtcaggaactgatttcacactgagaatcagcagagtggaggctgaggatgtgggtgtttattactgtgctcaaaatctagaacttccgct
cacgttcggtgctgggaccaagctggagctgaaacgg
Amino acid sequence:
mrfsaqllgllvlwipgstadivmtqaafsnpvtlgtsasiscrssksllhsngitylywylqkpgqspqlliyqmsnlasgvpdrf
sssgsgtdftlrisrveaedvgvyycaqnlelpltfgagtklelkr
71. 5B9scFv
Nucleotide sequence:
Aagcttgccgccatgaggttctctgctcagcttctggggctgcttgtgctctggatccctggatccactgcagatattgtgatgacgca
ggctgcattctccaatccagtcactcttggaacatcagcttccatctcctgcaggtctagtaagagtctcctacatagtaatggcatcact
tatttgtattggtatctgcagaagccaggccagtctcctcagctcctgatttatcagatgtccaaccttgcctcaggagtcccagacaggt
tcagtagcagtgggtcaggaactgatttcacactgagaatcagcagagtggaggctgaggatgtgggtgtttattactgtgctcaaaat
ctagaacttccgctcacgttcggtgctgggaccaagctggagctgaaacggggtggcggtggctcgggcggtggtgggtcgggtg
gcggcgggagctctcaggtgcagctgaagcagtcaggacctggcctagtgcagtcctcacagagcctgtccatcacctgcacagtc
tctggtttctcattaactacctatgctgtacactgggttcgccagtctccaggaaagggtctggagtggctgggagtgatatggagtggt
ggaatcacagactataatgcagctttcatatccagactgagcatcaccaaggacgattccaagagccaagttttctttaaaatgaacagt

[0859] ctgcaacctaatgacacagccatttattactgtgccagaaatgggggtgataactacccttattactatgctatggactactggggtcaa
ggaacctcagtcaccgtctcctcag
Amino acid sequence:
mrfsaqllgllvlwipgstadivmtqaafsnpvtlgtsasiscrssksllhsngitylywylqkpgqspqlliyqmsnlasgvpdrf
sssgsgtdftlrisrveaedvgvyycaqnlelpltfgagtklelkrggggsggggsggggssqvqlkqsgpglvqssqslsitctvs
gfslttyavhwvrqspgkglewlgviwsggitdynaafisrlsitkddsksqvttkmnslqpndtaiyycarnggdnypyyya
mdywgqgtsvtvss
72. 5B9 VH L11S
Nucleotide sequence:
gggagctctcaggtgcagctgaagcagtcaggacctggctcagtgcagtcctcacagagcctgtccatcacctgcacagtctctggt
ttctcattaactacctatgctgtacactgggttcgccagtctccaggaaagggtctggagtggctgggagtgatatggagtggtggaat
cacagactataatgcagctttcatatccagactgagcatcaccaaggacgattccaagagccaagttttctttaaaatgaacagtctgca
acctaatgacacagccatttattactgtgccagaaatgggggtgataactacccttattactatgctatggactactggggtcaaggaac
ctcagtcaccgtctcctcag
Amino acid sequence:
(gss)qvqlkqsgpgsvqssqslsitctvsgfslttyavhwvrqspgkglewlgviwsggitdynaafisrlsitkddsksqvttk
mnslqpndtaiyycamggdnypyyyamdywgqgtsvtvss
73. 5B9 VH L11S scFv
Nucleotide sequence:
aagcttgccgccatgaggttctctgctcagcttctggggctgcttgtgctctggatccctggatccactgcagatattgtgatgacgcag
gctgcattctccaatccagtcactcttggaacatcagcttccatctcctgcaggtctagtaagagtctcctacatagtaatggcatcactta
tttgtattggtatctgcagaagccaggccagtctcctcagctcctgatttatcagatgtccaaccttgcctcaggagtcccagacaggttc
agtagcagtgggtcaggaactgatttcacactgagaatcagcagagtggaggctgaggatgtgggtgtttattactgtgctcaaaatct
agaacttccgctcacgttcggtgctgggaccaagctggagctgaaacggggtggcggtggctcgggcggtggtgggtcgggtgg
cggcgggagctctcaggtgcagctgaagcagtcaggacctggctcagtgcagtcctcacagagcctgtccatcacctgcacagtct
ctggtttctcattaactacctatgctgtacactgggttcgccagtctccaggaaagggtctggagtggctgggagtgatatggagtggt
ggaatcacagactataatgcagctttcatatccagactgagcatcaccaaggacgattccaagagccaagttttctttaaaatgaacagt
ctgcaacctaatgacacagccatttattactgtgccagaaatgggggtgataactacccttattactatgctatggactactggggtcaa
ggaacctcagtcaccgtctcctcag
Amino acid sequence:
mrfsaqllgllvlwipgstadivmtqaafsnpvtlgtsasiscrssksllhsngitylywylqkpgqspqlliyqmsnlasgvpdrf
sssgsgtdftlrisrveaedvgvyycaqnlelpltfgagtklelkrggggsggggsggggssqvqlkqsgpgsvqssqslsitctvs
gfslttyavhwvrqspgkglewlgviwsggitdynaafisrlsitkddsksqvftkmnslqpndtaiyycamggdnypyyya
mdywgqgtsvtvss
73. 5B9 scFv (SSS-S)H WCH2 WCH3
Nucleotide sequence:
aagcttgccgccatgaggttctctgctcagcttctggggctgcttgtgctctggatccctggatccactgcagatattgtgatgacgcag
gctgcattctccaatccagtcactcttggaacatcagcttccatctcctgcaggtctagtaagagtctcctacatagtaatggcatcactta
tttgtattggtatctgcagaagccaggccagtctcctcagctcctgatttatcagatgtccaaccttgcctcaggagtcccagacaggttc
agtagcagtgggtcaggaactgatttcacactgagaatcagcagagtggaggctgaggatgtgggtgtttattactgtgctcaaaatct
agaacttccgctcacgttcggtgctgggaccaagctggagctgaaacggggtggcggtggctcgggcggtggtgggtcgggtgg
cggcgggagctctcaggtgcagctgaagcagtcaggacctggcctagtgcagtcctcacagagcctgtccatcacctgcacagtct
ctggtttctcattaactacctatgctgtacactgggttcgccagtctccaggaaagggtctggagtggctgggagtgatatggagtggt
ggaatcacagactataatgcagctttcatatccagactgagcatcaccaaggacgattccaagagccaagttttctttaaaatgaacagt
ctgcaacctaatgacacagccatttattactgtgccagaaatgggggtgataactacccttattactatgctatggactactggggtcaa
ggaacctcagtcaccgtctcctctgatcaggagcccaaatcttctgacaaaactcacacatccccaccgtcctcagcacctgaactcct
gggtggaccgtcagtcttcctcttccccccaaaacccaaggacaccctcatgatctcccggacccctgaggtcacatgcgtggtggt
ggacgtgagccacgaagaccctgaggtcaagttcaactggtacgtggacggcgtggaggtgcataatgccaagacaaagccgcg
ggaggagcagtacaacagcacgtaccgtgtggtcagcgtcctcaccgtcctgcaccaggactggctgaatggcaaggagtacaag
tgcaaggtctccaacaaagccctcccagcccccatcgagaaaaccatctccaaagccaaagggcagccccgagaaccacaggtgt
acaccctgcccccatcccgggatgagctgaccaagaaccaggtcagcctgacctgcctggtcaaaggcttctatccaagcgacatc
gccgtggagtgggagagcaatgggcagccggagaacaactacaagaccacgcctcccgtgctggactccgacggctccttcttcc
tctacagcaagctcaccgtggacaagagcaggtggcagcaggggaacgtcttctcatgctccgtgatgcatgaggctctgcacaac
cactacacgcagaagagcctctccctgtctccgggtaaatgatctagag
Amino acid sequence:
mrfsaqllgllvlwipgstadivmtqaafsnpvtlgtsasiscrssksllhsngitylywylqkpgqspqlliyqmsnlasgvpdrf
sssgsgtdftlrisrveaedvgvyycaqnlelpltfgagtklelkrggggsggggsggggssqvqlkqsgpglvqssqslsitctvs
gfslttyavhwvrqspgkglewlgviwsggitdynaafisrlsitkddsksqvttkmnslqpndtaiyycarnggdnypyyya
mdywgqgtsvtvssdqepkssdkthtsppssapellggpsvflfppkpkdtlmisrtpevtcvvvdvshedpevkfnwyvdg
vevhnaktkpreeqynstyrvvsvltvlhqdwlngkeykckvsnkalpapiektiskakgqprepqvytlppsrdeltknqvslt
clvkgfypsdiavewesngqpennykttppvldsdgsttlyskltvdksrwqqgnvfscsvmhealhnhytqkslslspgk
74. 5B9 scFv VHL11S (SSS-S)H WCH2 WCH3
Nucleotide sequence:
aagcttgccgccatgaggttctctgctcagcttctggggctgcttgtgctctggatccctggatccactgcagatattgtgatgacgcag
gctgcattctccaatccagtcactcttggaacatcagcttccatctcctgcaggtctagtaagagtctcctacatagtaatggcatcactta
tttgtattggtatctgcagaagccaggccagtctcctcagctcctgatttatcagatgtccaaccttgcctcaggagtcccagacaggttc
agtagcagtgggtcaggaactgatttcacactgagaatcagcagagtggaggctgaggatgtgggtgtttattactgtgctcaaaatct
agaacttccgctcacgttcggtgctgggaccaagctggagctgaaacggggtggcggtggctcgggcggtggtgggtcgggtgg
cggcgggagctctcaggtgcagctgaagcagtcaggacctggctcagtgcagtcctcacagagcctgtccatcacctgcacagtct
ctggtttctcattaactacctatgctgtacactgggttcgccagtctccaggaaagggtctggagtggctgggagtgatatggagtggt
ggaatcacagactataatgcagctttcatatccagactgagcatcaccaaggacgattccaagagccaagttttctttaaaatgaacagt
ctgcaacctaatgacacagccatttattactgtgccagaaatgggggtgataactacccttattactatgctatggactactggggtcaa
ggaacctcagtcaccgtctcctctgatcaggagcccaaatcttctgacaaaactcacacatccccaccgtcctcagcacctgaactcct
gggtggaccgtcagtcttcctcttccccccaaaacccaaggacaccctcatgatctcccggacccctgaggtcacatgcgtggtggt
ggacgtgagccacgaagaccctgaggtcaagttcaactggtacgtggacggcgtggaggtgcataatgccaagacaaagccgcg
ggaggagcagtacaacagcacgtaccgtgtggtcagcgtcctcaccgtcctgcaccaggactggctgaatggcaaggagtacaag
tgcaaggtctccaacaaagccctcccagcccccatcgagaaaaccatctccaaagccaaagggcagccccgagaaccacaggtgt
acaccctgcccccatcccgggatgagctgaccaagaaccaggtcagcctgacctgcctggtcaaaggcttctatccaagcgacatc
gccgtggagtgggagagcaatgggcagccggagaacaactacaagaccacgcctcccgtgctggactccgacggctccttcttcc
tctacagcaagctcaccgtggacaagagcaggtggcagcaggggaacgtcttctcatgctccgtgatgcatgaggctctgcacaac
cactacacgcagaagagcctctccctgtctccgggtaaatgatctagag
Amino acid sequence:
mrfsaqllgllvlwipgstadivmtqaafsnpvtlgtsasiscrssksllhsngitylywylqkpgqspqlliyqmsnlasgvpdrf
sssgsgtdftlrisrveaedvgvyycaqnlelpltfgagtklelkrggggsggggsggggssqvqlkqsgpgsvqssqslsitctvs
gfslttyavhwvrqspgkglewlgviwsggitdynaafisrlsitkddsksqvftkmnslqpndtaiyycarnggdnypyyya
mdywgqgtsvtvssdqepkssdkthtsppssapellggpsvflfppkpkdtlmisrtpevtcvvvdvshedpevkfnwyvdg
vevhnaktkpreeqynstyrvvsvltvlhqdwlngkeykckvsnkalpapiektiskakgqprepqvytlppsrdeltknqvslt
clvkgfypsdiavewesngqpennykttppvldsdgsttlyskltvdksrwqqgnvfscsvmhealhnhytqkslslspgk
75. 2H7 scFv (SSS-S)H P238SCH2 WCH3
Nucleotide sequence:
aagcttgccgccatggattttcaagtgcagattttcagcttcctgctaatcagtgcttcagtcataattgccagaggacaaattgttctctc
ccagtctccagcaatcctgtctgcatctccaggggagaaggtcacaatgacttgcagggccagctcaagtgtaagttacatgcactgg
taccagcagaagccaggatcctcccccaaaccctggatttatgccccatccaacctggcttctggagtccctgctcgcttcagtggca
gtgggtctgggacctcttactctctcacaatcagcagagtggaggctgaagatgctgccacttattactgccagcagtggagttttaac
ccacccacgttcggtgctgggaccaagctggagctgaaagatggcggtggctcgggcggtggtggatctggaggaggtgggagc
tctcaggcttatctacagcagtctggggctgagctggtgaggcctggggcctcagtgaagatgtcctgcaaggcttctggctacacat
ttaccagttacaatatgcactgggtaaagcagacacctagacagggcctggaatggattggagctatttatccaggaaatggtgatact
tcctacaatcagaagttcaagggcaaggccacactgactgtagacaaatcctccagcacagcctacatgcagctcagcagcctgac
atctgaagactctgcggtctatttctgtgcaagagtggtgtactatagtaactcttactggtacttcgatgtctggggcacagggaccac
ggtcaccgtctcttctgatcaggagcccaaatcttctgacaaaactcacacatccccaccgtcctcagcacctgaactcctgggggga
tcgtcagtcttcctcttccccccaaaacccaaggacaccctcatgatctcccggacccctgaggtcacatgcgtggtggtggacgtga
gccacgaagaccctgaggtcaagttcaactggtacgtggacggcgtggaggtgcataatgccaagacaaagccgcgggaggagc
agtacaacagcacgtaccgtgtggtcagcgtcctcaccgtcctgcaccaggactggctgaatggcaaggagtacaagtgcaaggtc
tccaacaaagccctcccagcccccatcgagaaaacaatctccaaagccaaagggcagccccgagaaccacaggtgtacaccctg
cccccatcccgggatgagctgaccaagaaccaggtcagcctgacctgcctggtcaaaggcttctatcccagcgacatcgccgtgga
gtgggagagcaatgggcagccggagaacaactacaagaccacgcctcccgtgctggactccgacggctccttcttcctctacagca
agctcaccgtggacaagagcaggtggcagcaggggaacgtcttctcatgctccgtgatgcatgaggctctgcacaaccactacacg
cagaagagcctctccctgtctccgggtaaatgatctaga
Amino acid sequence:
mdfqvqifsflhisasviiargqivlsqspailsaspgekvtmtcrasssvsymhwyqqkpgsspkpwiyapsnlasgvparfsg
sgsgtsysltisrveaedaatyycqqwsfnpptfgagtklelkdgggsggggsggggssqaylqqsgaelvrpgasvkmsckas
gytftsynmhwvkqtprqglewigaiypgngdtsynqkfkgkatltvdkssstaymqlssltsedsavyfcarvvyysnsywy
fdvwgtgttvtvssdqepkssdkthtsppssapellggssvflfppkpkdtlmisrtpevtcvvvdvshedpevkfnwyvdgve
vhnaktkpreeqynstyrvvsvlvvlhqdwlngkeykckvsnkalpapiektiskakgqprepqvytlppsrdeltknqvsltcl
vkgfypsdiavewesngqpennykttppvldsdgsttlyskltvdksrwqqgnvfscsvmhealhnhytqkslslspgk
76. 2H7 scFv VH L11S (SSS-S)H P238SCH2 WCH3
Nucleotide sequence:
aagcttgccgccatggattttcaagtgcagattttcagcttcctgctaatcagtgcttcagtcataattgccagaggacaaattgttctctc
ccagtctccagcaatcctgtctgcatctccaggggagaaggtcacaatgacttgcagggccagctcaagtgtaagttacatgcactgg
taccagcagaagccaggatcctcccccaaaccctggatttatgccccatccaacctggcttctggagtccctgctcgcttcagtggca
gtgggtctgggacctcttactctctcacaatcagcagagtggaggctgaagatgctgccacttattactgccagcagtggagttttaac
ccacccacgttcggtgctgggaccaagctggagctgaaagatggcggtggctcgggcggtggtggatctggaggaggtgggagc
tctcaggcttatctacagcagtctggggctgagtcggtgaggcctggggcctcagtgaagatgtcctgcaaggcttctggctacacat
ttaccagttacaatatgcactgggtaaagcagacacctagacagggcctggaatggattggagctatttatccaggaaatggtgatact
tcctacaatcagaagttcaagggcaaggccacactgactgtagacaaatcctccagcacagcctacatgcagctcagcagcctgac
atctgaagactctgcggtctatttctgtgcaagagtggtgtactatagtaactcttactggtacttcgatgtctggggcacagggaccac
ggtcaccgtctcttctgatcaggagcccaaatcttctgacaaaactcacacatccccaccgtcctcagcacctgaactcctgggggga
tcgtcagtcttcctcttccccccaaaacccaaggacaccctcatgatctcccggacccctgaggtcacatgcgtggtggtggacgtga
gccacgaagaccctgaggtcaagttcaactggtacgtggacggcgtggaggtgcataatgccaagacaaagccgcgggaggagc
agtacaacagcacgtaccgtgtggtcagcgtcctcaccgtcctgcaccaggactggctgaatggcaaggagtacaagtgcaaggtc
tccaacaaagccctcccagcccccatcgagaaaacaatctccaaagccaaagggcagccccgagaaccacaggtgtacaccctg
cccccatcccgggatgagctgaccaagaaccaggtcagcctgacctgcctggtcaaaggcttctatcccagcgacatcgccgtgga
gtgggagagcaatgggcagccggagaacaactacaagaccacgcctcccgtgctggactccgacggctccttcttcctctacagca
agctcaccgtggacaagagcaggtggcagcaggggaacgtcttctcatgctccgtgatgcatgaggctctgcacaaccactacacg
cagaagagcctctccctgtctccgggtaaatgatctaga
Amino acid sequence:
mdfqvqifsflhisasviiargqivlsqspailsaspgekvtmtcrasssvsymhwyqqkpgsspkpwiyapsnlasgvparfsg
sgsgtsysltisrveaedaatyycqqwsfnpptfgagtklelkdgggsggggsggggssqaylqqsgaesvrpgasvkmsckas
gytftsynmhwvkqtprqglewigaiypgngdtsynqkfkgkatltvdkssstaymqlssltsedsavyfcarvvyysnsywy
fdvwgtgttvtvssdqepkssdkthtsppssapellggssvflfppkpkdtlmisrtpevtcvvvdvshedpevkfnwyvdgve
vhnaktkpreeqynstyrvvsvltvlhqdwlngkeykckvsnkalpapiektiskakgqprepqvytlppsrdeltknqvsltcl
vkgfypsdiavewesngqpennykttppvldsdgsttlyskltvdksrwqqgnvfscsvmhealhnhytqkslslspgk
77. 2H7 scFv IgA WH WCH2 WCH3 + J Chain
Nucleotide sequence:
2H7 scFv IgA WH WCH2 WCH3
aagcttgccgccatggattttcaagtgcagattttcagcttcctgctaatcagtgcttcagtcataattgccagaggacaaattgttctctc
ccagtctccagcaatcctgtctgcatctccaggggagaaggtcacaatgacttgcagggccagctcaagtgtaagttacatgcactgg
taccagcagaagccaggatcctcccccaaaccctggatttatgccccatccaacctggcttctggagtccctgctcgcttcagtggca
gtgggtctgggacctcttactctctcacaatcagcagagtggaggctgaagatgctgccacttattactgccagcagtggagttttaac
ccacccacgttcggtgctgggaccaagctggagctgaaagatggcggtggctcgggcggtggtggatctggaggaggtgggagc
tctcaggcttatctacagcagtctggggctgagctggtgaggcctggggcctcagtgaagatgtcctgcaaggcttctggctacacat
ttaccagttacaatatgcactgggtaaagcagacacctagacagggcctggaatggattggagctatttatccaggaaatggtgatact
tcctacaatcagaagttcaagggcaaggccacactgactgtagacaaatcctccagcacagcctacatgcagctcagcagcctgac
atctgaagactctgcggtctatttctgtgcaagagtggtgtactatagtaactcttactggtacttcgatgtctggggcacagggaccac
ggtcaccgtctcttctgatcagccagttccctcaactccacctaccccatctccctcaactccacctaccccatctccctcatgctgccac
ccccgactgtcactgcaccgaccggccctcgaggacctgctcttaggttcagaagcgatcctcacgtgcacactgaccggcctgag
agatgcctcaggtgtcaccttcacctggacgccctcaagtgggaagagcgctgttcaaggaccacctgaccgtgacctctgtggctg
ctacagcgtgtccagtgtcctgccgggctgtgccgagccatggaaccatgggaagaccttcacttgcactgctgcctaccccgagtc
caagaccccgctaaccgccaccctctcaaaatccggaaacacattccggcccgaggtccacctgctgccgccgccgtcggaggag
ctggccctgaacgagctggtgacgctgacgtgcctggcacgtggcttcagccccaaggatgtgctggttcgctggctgcaggggtc
acaggagctgccccgcgagaagtacctgacttgggcatcccggcaggagcccagccagggcaccaccaccttcgctgtgaccag
catactgcgcgtggcagccgaggactggaagaagggggacaccttctcctgcatggtgggccacgaggccctgccgctggccttc
acacagaagaccatcgaccgcttggcgggtaaacccacccatgtcaatgtgtctgttgtcatggcggaggtggacggcacctgctac
tgataatctaga
+J Chain
agatctcaagaagatgaaaggattgttcttgttgacaacaaatgtaagtgtgcccggattacttccaggatcatccgttcttccgaagatc
ctaatgaggacattgtggagagaaacatccgaattattgttcctctgaacaacagggagaatatctctgatcccacctcaccattgaga
accagatttgtgtaccatttgtctgacctcagctgtaaaaaatgtgatcctacagaagtggagctggataatcagatagttactgctaccc
agagcaatatctgtgatgaagacagtgctacagagacctgctacacttatgacagaaacaagtgctacacagctgtggtcccactcgt
atatggtggtgagaccaaaatggtggaaacagccttaaccccagatgcctgctatcctgactaatctaga
Amino acid sequence:
2H7 scFv IgA WH WCH2 WCH3
mdfqvqifsflhisasviiargqivlsqspailsaspgekvtmtcrasssvsymhwyqqkpgsspkpwiyapsnlasgvparfsg
sgsgtsysltisrveaedaatyycqqwsfnpptfgagtklelkdgggsggggsggggssqaylqqsgaelvrpgasvkmsckas
gytftsynmhwvkqtprqglewigaiypgngdtsynqkfkgkatltvdkssstaymqlssltsedsavyfcarvvyysnsywy
fdvwgtgttvtvssdqpvpstpptpspstpptpspscchprlslhrpaledlllgseailtctltglrdasgvtftwtpssgksavqgp
pdrdlcgcysvssvlpgcaepwnhgktfictaaypesktpltatlsksgntfrpevhllpppseelalnelvtltclargfspkdvlvr
wlqgsqelprekyltwasrqepsqgtttfavtsilrvaaedwkkgdtfscmvghealplaftqktidrlagkpthvnvsvvmaev
dgtcy
+J Chain
rsqederivlvdnkckcaritsriirssedpnediverniriivplnnrenisdptsplrtrfvyhlsdlsckkcdpteveldnqivtatq
snicdedsatetcytydmkcytavvplvyggetkmvetaltpdacypd
78. 2H7 scFv VH L11S (SSS-S)H WCH2 WCH3
Nucleotide sequence:
aagcttgccgccatggattttcaagtgcagattttcagcttcctgctaatcagtgcttcagtcataattgccagaggacaaattgttctctc
ccagtctccagcaatcctgtctgcatctccaggggagaaggtcacaatgacttgcagggccagctcaagtgtaagttacatgcactgg
taccagcagaagccaggatcctcccccaaaccctggatttatgccccatccaacctggcttctggagtccctgctcgcttcagtggca
gtgggtctgggacctcttactctctcacaatcagcagagtggaggctgaagatgctgccacttattactgccagcagtggagttttaac
ccacccacgttcggtgctgggaccaagctggagctgaaagatggcggtggctcgggcggtggtggatctggaggaggtgggagc
tctcaggcttatctacagcagtctggggctgagtcggtgaggcctggggcctcagtgaagatgtcctgcaaggcttctggctacacat
ttaccagttacaatatgcactgggtaaagcagacacctagacagggcctggaatggattggagctatttatccaggaaatggtgatact
tcctacaatcagaagttcaagggcaaggccacactgactgtagacaaatcctccagcacagcctacatgcagctcagcagcctgac
atctgaagactctgcggtctatttctgtgcaagagtggtgtactatagtaactcttactggtacttcgatgtctggggcacagggaccac
ggtcaccgtctcttctgatcaggagcccaaatcttctgacaaaactcacacatccccaccgtcctcagcacctgaactcctgggggga
ccgtcagtcttcctcttccccccaaaacccaaggacaccctcatgatctcccggacccctgaggtcacatgcgtggtggtggacgtga
gccacgaagaccctgaggtcaagttcaactggtacgtggacggcgtggaggtgcataatgccaagacaaagccgcgggaggagc
agtacaacagcacgtaccgtgtggtcagcgtcctcaccgtcctgcaccaggactggctgaatggcaaggagtacaagtgcaaggtc
tccaacaaagccctcccagcccccatcgagaaaacaatctccaaagccaaagggcagccccgagaaccacaggtgtacaccctg
cccccatcccgggatgagctgaccaagaaccaggtcagcctgacctgcctggtcaaaggcttctatcccagcgacatcgccgtgga
gtgggagagcaatgggcagccggagaacaactacaagaccacgcctcccgtgctggactccgacggctccttcttcctctacagca
agctcaccgtggacaagagcaggtggcagcaggggaacgtcttctcatgctccgtgatgcatgaggctctgcacaaccactacacg
cagaagagcctctccctgtctccgggtaaatgatctaga
Amino acid sequence:
mdfqvqifsflhisasviiargqivlsqspailsaspgekvtmtcrasssvsymhwyqqkpgsspkpwiyapsnlasgvparfsg
sgsgtsysltisrveaedaatyycqqwsfnpptfgagtklelkdgggsggggsggggssqaylqqsgaesvrpgasvkmsckas
gytftsynmhwvkqtprqglewigaiypgngdtsynqkfkgkatltvdkssstaymqlssltsedsavyfcarvvyysnsywy
fdvwgtgttvtvssdqepkssdkthtsppssapellggpsvflfppkpkdtlmisrtpevtcvvvdvshedpevkfnwyvdgv
evhnaktkpreeqynstyrvvsvltvlhqdwlngkeykckvsnkalpapiektiskakgcijrepqvytlppsrdeltknqvsltc
lvkgfypsdiavewesngcipennykttppvldsdgsttlyskltvdksrwqqgnvfscsvmhealhnhytqkslslspgk
79. 2H7 scFv VH L11S (CSS-S)H WCH2 WCH3
Nucleotide sequence:
aagcttgccgccatggattttcaagtgcagattttcagcttcctgctaatcagtgcttcagtcataattgccagaggacaaattgttctctc
ccagtctccagcaatcctgtctgcatctccaggggagaaggtcacaatgacttgcagggccagctcaagtgtaagttacatgcactgg
taccagcagaagccaggatcctcccccaaaccctggatttatgccccatccaacctggcttctggagtccctgctcgcttcagtggca
gtgggtctgggacctcttactctctcacaatcagcagagtggaggctgaagatgctgccacttattactgccagcagtggagttttaac
ccacccacgttcggtgctgggaccaagctggagctgaaagatggcggtggctcgggcggtggtggatctggaggaggtgggagc
tctcaggcttatctacagcagtctggggctgagtcggtgaggcctggggcctcagtgaagatgtcctgcaaggcttctggctacacat
ttaccagttacaatatgcactgggtaaagcagacacctagacagggcctggaatggattggagctatttatccaggaaatggtgatact
tcctacaatcagaagttcaagggcaaggccacactgactgtagacaaatcctccagcacagcctacatgcagctcagcagcctgac
atctgaagactctgcggtctatttctgtgcaagagtggtgtactatagtaactcttactggtacttcgatgtctggggcacagggaccac
ggtcaccgtctcttctgatcaggagcccaaatcttgtgacaaaactcacacatccccaccgtcctcagcacctgaactcctgggggga
ccgtcagtcttcctcttccccccaaaacccaaggacaccctcatgatctcccggacccctgaggtcacatgcgtggtggtggacgtga
gccacgaagaccctgaggtcaagttcaactggtacgtggacggcgtggaggtgcataatgccaagacaaagccgcgggaggagc
agtacaacagcacgtaccgtgtggtcagcgtcctcaccgtcctgcaccaggactggctgaatggcaaggagtacaagtgcaaggtc
tccaacaaagccctcccagcccccatcgagaaaacaatctccaaagccaaagggcagccccgagaaccacaggtgtacaccctg
cccccatcccgggatgagctgaccaagaaccaggtcagcctgacctgcctggtcaaaggcttetatcccagcgacatcgccgtgga
gtgggagagcaatgggcagccggagaacaactacaagaccacgcctcccgtgctggactccgacggctccttcttcctctacagca
agctcaccgtggacaagagcaggtggcagcaggggaacgtcttctcatgctccgtgatgcatgaggctctgcacaaccactacacg
cagaagagcctctccctgtctccgggtaaatgatctaga
Amino acid sequence:
mdfqvqifsflhisasviiargqivlsqspailsaspgekvtmtcrasssvsymhwyqqkpgsspkpwiyapsnlasgvparfsg
sgsgtsysltisrveaedaatyycqqwsfnpptfgagtklelkdgggsggggsggggssqaylqqsgaesvrpgasvkmsckas
gytftsynmhwvkqtprqglewigaiypgngdtsynqkfkgkatltvdkssstaymqlssltsedsavyfcarvvyysnsywy
fdvwgtgttvtvssdqepkscdkthtsppssapellggpsvflfppkpkdtlmisrtpevtcvvvdvshedpevkfnwyvdgv
evhnaktkpreeqynstyrvvsvltvlhqdwlngkeykckvsnkalpapiektiskakgciprepqvytlppsrdeltknqvsltc
lvkgfypsdiavewesngqpennykttppvldsdgsttlyskhvdksrwqqgnvfscsvmhealhnhytqkslslspgk
78. G8-1 scFv VHL11S (SCS-S)H WCH2 WCH3
Nucleotide sequence:
gttgttaagcttgccgccatggtatccacagctcagttccttgggttgctgctgctgtggcttacaggtggcagatgtgacatccagatg
actcagtctccagcetccctatctgcatcttgggagagactgtcaccatcacatgtcgaacaagtgaaaatgtttacagttatttggctt
ggtatcagcagaaacagggaaaatctcctcagctcctggtctcttttgcaaaaaccttagcagaaggtgtgccatcaaggttcagtgg
cagtggatcaggcacacagttttctctgaagatcagcagcctgcagcctgaagattctggaagttatttctgtcaacatcattccgataat
ccgggacgttcggtggaggcaccgaactggagatcaaaggtggcggtggctcgggcggtggtgggtcgggtggcggcggatc
gtcagcggtccagctgcagcagtctggacctgagtcggaaaagcctggcgcttcagtgaagatttcctgcaaggcttctggttactca
ttcactggctacaatatgaactgggtgaagcagaataatggaaagagccttgagtggattggaaatattgatccttattatggtggtact
acctacaaccggaagttcaagggcaaggccacattgactgtagacaaatcctccagcacagcctacatgcagctcaagagtctgac
atctgaggactctgcagtctattactgtgcaagatcggtcggccctatggactactggggtcaaggaacctcagtcaccgtctcttctg
atcaggagcccaaatcttctgacaaaactcacacatgcccaccgtcctcagcacctgaactcctgggtggaccgtcagtcttcctcttc
cccccaaaacccaaggacaccctcatgatctcccggacccctgaggtcacatgcgtggtggtggacgtgagccacgaagaccctg
aggtcaagttcaactggtacgtggacggcgtggaggtgcataatgccaagacaaagccgcgggaggagcagtacaacagcacgt
accggtggtcagcgtcctcaccgtcctgcaccaggactggctgaatggcaaggagtacaagtgcaaggtctccaacaaagccctc
ccagcccccatcgagaaaacaatctccaaagccaaagggcagccccgagaaccacaggtgtacaccctgcccccatcccgggat
gagctgaccaagaaccaggtcagcctgacctgcctggtcaaaggcttctatccaagcgacatcgccgtggagtgggagagcaatg
ggcagccggagaacaactacaagaccacgcctcccgtgctggactccgacggctccttcttcctctacagcaagctcaccgtggac
aagagcaggtggcagcaggggaacgtcttctcatgctccgtgatgcatgaggctctgcacaaccactacacgcagaagagcctctc
cctgtctccgggtaaatgatctagag
Amino acid sequence:
mvstaqflgllllwltggrcdiqmtqspaslsasvgetvtitcrtsenvysylawyqqkqgkspqllvsfaktlaegvpsrfsgsgs
gtqfslkisslqpedsgsyfcqhhsdnpwtfgggteleikggggsggggsggggssavqlqqsgpesekpgasvkisckasgys
ftgynmnwvkqnngkslewignidpyyggttynrkfkgkatltvdkssstaymqlksltsedsavyycarsvgpmdywgqg
tsvtvssdqepkssdkthtcppssapellggpsvflfppkpkdtlmisrtpevtcvvvdvshedpevkfnwyvdgvevhnakt
kpreeqynstyrvvsvltvlhqdwlngkeykckvsnkalpapiektiskakgciprepqvytlppsrdeltknqvsltclvkgfyp
sdiavewesngqpennykttppvldsdgsttlyskltvdksrwqqgnvfscsvmhealhnhytqkslslspgk
79.. G28-1 scFv VHL11S (CCS-P)H WCH2 WCH3
Nucleotide sequence:
gttgttaagcttgccgccatggtatccacagctcagttccttgggttgctgctgctgtggcttacaggtggcagatgtgacatccagatg
actcagtctccagcctccetatctgcatctgtgggagagactgtcaccatcacatgtcgaacaagtgaaaatgtttacagttatttggctt
ggtatcagcagaaacagggaaaatctcctcagctcctggtctcttttgcaaaaaccttagcagaaggtgtgccatcaaggttcagtgg
cagtggatcaggcacacagttttctctgaagatcagcagcctgcagcctgaagattctggaagttatttctgtcaacatcattccgataat
ccgtggacgttcggtggaggcaccgaactggagatcaaaggtggcggtggctcgggcggtggtgggtcgggtggcggcggatc
gtcagcggtccagctgcagcagtctggacctgagtcggaaaagcctggcgcttcagtgaagatttcctgcaaggcttctggttactca
ttcactggctacaatatgaactgggtgaagcagaataatggaaagagccttgagtggattggaaatattgatccttattatggtggtact
acctacaaccggaagttcaagggcaaggccacattgactgtagacaaatcctccagcacagcctacatgcagctcaagagtctgac
atctgaggactctgcagtctattactgtgcaagatcggtcggccctatggactactggggtcaaggaacctcagtcaccgtctcttctg
atcaggagcccaaatettgtgacaaaactcacacatgtccaccgtccccagcacctgaactcctgggtggaccgtcagtcttcctcttc
cccccaaaacccaaggacaccctcatgatctcccggacccctgaggtcacatgcgtggtggtggacgtgagccacgaagaccctg
aggtcaagttcaactggtacgtggacggcgtggaggtgcataatgccaagacaaagccgcgggaggagcagtacaacagcacgt
accgtgtggtcagcgtcctcaccgtcctgcaccaggactggctgaatggcaaggagtacaagtgcaaggtctccaacaaagccctc
ccagcccccatcgagaaaacaatctccaaagccaaagggcagccccgagaaccacaggtgtacaccctgcccccatcccgggat
gagctgaccaagaaccaggtcagcctgacctgcctggtcaaaggcttctatccaagcgacatcgccgtggagtgggagagcaatg
ggcagccggagaacaactacaagaccacgcctcccgtgctggactccgacggctccttcttcctctacagcaagctcaccgtggac
aagagcaggtggcagcaggggaacgtcttctcatgctccgtgatgcatgaggctctgcacaaccactacacgcagaagagcctctc
cctgtctccgggtaaatgatctaga
Amino acid sequence:
mvstaqflgllllwltggrcdiqmtqspaslsasvgetvtitcrtsenvysylawyqqkqgkspqllvsfaktlaegvpsrfsgsgs
gtqfslkisslqpedsgsyfcqhhsdnpwtfgggteleikggggsggggsggggssavqlqqsgpesekpgasvkisckasgys
ftgynmnwvkqnngkslewignidpyyggttynrkfkgkatltvdkssstaymqlksltsedsavyycarsvgpmdywgqg
tsvtvssdqepkscdkthtcppspapellggpsvflfppkpkdtlmisrtpevtcvvvdvshedpevkfnwyvdgvevhnakt
kpreeqynstyrvvsvltvlhqdwlngkeykckvsnkalpapiektiskakgqprepqvytlppsrdeltknqvsltclvkgfyp
sdiavewesngqpennykttppvldsdgsttlyskltvdksrwqqgnvfscsvmhealhnhytqkslslspgk
80. G28-1 scFv VH L11S (SCC-P)H WCH2 WCH3
Nucleotide sequence:
gttgttaagcttgccgccatggtatccacagctcagttccttgggttgctgctgctgtggcttacaggtggcagatgtgacatccagatg
actcagtctccagcctccctatctgcatctgtgggagagactgtcaccatcacatgtcgaacaagtgaaaatgtttacagttatttggctt
ggtatcagcagaaacagggaaaatctcctcagctcctggtctcttttgcaaaaaccttagcagaaggtgtgccatcaaggttcagtgg
cagtggatcaggcacacagttttctctgaagatcagcagcctgcagcctgaagattctggaagttatttctgtcaacatcattccgataat
ccgggacgttcggtggaggcaccgaactggagatcaaaggtggcggtggctcgggcggtggtgggtcgggtggcggcggatc
gtcagcggtccagctgcagcagtctggacctgagtcggaaaagcctggcgcttcagtgaagatttcctgcaaggcttctggttactca
ttcactggctacaatatgaactgggtgaagcagaataatggaaagagccttgagtggattggaaataflgatccttattatggtggtact
acctacaaccggaagttcaagggcaaggccacattgactgtagacaaatcctccagcacagcctacatgcagctcaagagtctgac
atctgaggactctgcagtctattactgtgcaagatcggtcggccctatggactactggggtcaaggaacctcagtcaccgtctcttctg
atcaggagcccaaatcttctgacaaaactcacacatgcccaccgtgcccagcacctgaactcctgggtggaccgtcagtcttcctctt
ccccccaaaacccaaggacaccctcatgatctcccggacccctgaggtcacatgcgtggtggtggacgtgagccacgaagaccct
gaggtcaagttcaactggtacgtggacggcgtggaggtgcataatgccaagacaaagccgcgggaggagcagtacaacagcacg
taccgtgtggtcagcgtcctcaccgtcctgcaccaggactggctgaatggcaaggagtacaagtgcaaggtctccaacaaagccct
cccagcccccatcgagaaaacaatctccaaagccaaagggcagccccgagaaccacaggtgtacaccctgcccccatcccggga
tgagctgaccaagaaccaggtcagcctgacctgcctggtcaaaggcttctatccaagcgacatcgccgtggagtgggagagcaatg
ggcagccggagaacaactacaagaccacgcctcccgtgctggactccgacggctccttcttcctctacagcaagctcaccgtggac
aagagcaggtggcagcaggggaacgtcttctcatgctccgtgatgcatgaggctctgcacaaccactacacgcagaagagcctctc
cctgtctccgggtaaatgatctaga
Amino acid sequence:
mvstaqflgllllwltggrcdiqmtqspaslsasvgetvtitcrtsenvysylawyqqkqgkspqllvsfaktlaegvpsrfsgsgs
gtqfslkisslqpedsgsyfcqhhsdnpwtfgggteleikggggsggggsggggssavqlqqsgpesekpgasvkisckasgys
ftgynmnwvkqnngkslewignidpyyggttynrktkgkatltvdkssstaymqlksltsedsavyycarsvgpmdywgqg
tsvtvssdqepkssdkthtcppcpapellggpsvflfppkpkdtlmisrtpevtcvvvdvshedpevkfnwyvdgvevhnakt
kpreeqynstyrvvsvltvlhqdwlngkeykckvsnkalpapiektiskakgqprepqvytlppsrdeltknqvsltclvkgfyp
sdiavewesngqpennykttppvldsdgsttlyskltvdksrwqqgnvfscsvmhealhnhytqkslslspgk
81. G28-1 scFv VH L11S mIgE CH2 CH3 CH4
Nucleotide sequence:
aagcttgccgccatggtatccacagctcagttccttgggttgctgctgctgtggcttacaggtggcagatgtgacatccagatgactca
gtctccagcctccctatctgcatctgtgggagagactgtcaccatcacatgtcgaacaagtgaaaatgtttacagttatttggcttggtat
cagcagaaacagggaaaatctcctcagctcctggtctcttttgcaaaaaccttagcagaaggtgtgccatcaaggttcagtggcagtg
gatcaggcacacagttttctctgaagatcagcagcctgcagcctgaagattctggaagttatttctgtcaacatcattccgataatccgtg
gacgttcggtggaggcaccgaactggagatcaaaggtggcggtggctcgggcggtggtgggtcgggtggcggcggatcgtcag
cggtccagctgcagcagtctggacctgagtcggaaaagcctggcgcttcagtgaagatttcctgcaaggcttctggttactcattcact
ggctacaatatgaactgggtgaagcagaataatggaaagagccttgagtggattggaaatattgatccttattatggtggtactacctac
aaccggaagttcaagggcaaggccacattgactgtagacaaatcctccagcacagcctacatgcagctcaagagtctgacatctga
ggactctgcagtctattactgtgcaagatcggtcggccctatggactactggggtcaaggaacctcagtcaccgtctcttctgatcacg
ttcgacctgtcaacatcactgagcccaccttggagctactccattcatcctgcgaccccaatgcattccactccaccatccagctgtact
gcttcatttatggccacatcctaaatgatgtctctgtcagctggctaatggacgatcgggagataactgatacacttgcacaaactgttct
aatcaaggaggaaggcaaactagcctctacctgcagtaaactcaacatcactgagcagcaatggatgtctgaaagcaccttcacctg
caaggtcacctcccaaggcgtagactatttggcccacactcggagatgcccagatcatgagccacggggtgtgattacctacctgat
cccacccagccccctggacctgtatcaaaacggtgctcccaagcttacctgtctggtggtggacctggaaagcgagaagaatgtcaa
tgtgacgtggaaccaagagaagaagacttcagtctcagcatcccagtggtacactaagcaccacaataacgccacaactagtatcac
ctccatcctgcctgtagttgccaaggactggattgaaggctacggctatcagtgcatagtggaccaccctgattttcccaagcccattgt
gcgttccatcaccaagaccccaggccagcgctcagcccccgaggtatatgtgttcccaccaccagaggaggagagcgaggacaa
acgcacactcacctgtttgatccagaacttcttccctgaggatatctctgtgcagtggctgggggatggcaaactgatctcaaacagcc
agcacagtaccacaacacccctgaaatccaatggctccaatcaaggcttcttcatcttcagtcgcctagaggtcgccaagacactctg
gacacagagaaaacagttcacctgccaagtgatccatgaggcacttcagaaacccaggaaactggagaaaacaatatccacaagc
cttggtaacacctccctccgtccatcctagtaatctagagg
Amino acid sequence:
mvstaqflgllllwltggrcdiqmtqspaslsasvgetvtitcrtsenvysylawyqqkqgkspqllvsfaktlaegvpsrfsgsgs
gtqfslkisslqpedsgsyfcqhhsdnpwtfgggteleikggggsggggsggggssavqlqqsgpesekpgasvkisckasgys
ftgynmnwvkqnngkslewignidpyyggttynrkfkgkatltvdkssstaymqlksltsedsavyycarsvgpmdywgqg
tsvtvssdhvrpvniteptlellhsscdpnafhstiqlycfiyghilndvsvswlmddreitdtlaqtvlikeegklastcsklniteqq
wmsestfickvtsqgvdylahtrrcpdheprgvitylippspldlyqngapkltclvvdleseknvnvtwnqekktsvsasqwy
tkhhimattsitsilpvvakdwiegygyqcivdhpdfpkpivrsitktpgqrsapevyvfpppeeesedkrtltcliqnttpedisv
qwlgdgklisnsqhstttplksngsnqgttifsrlevaktlwtqrkqftcqvihealqkprklektistslgntslrps
82. G28-1 scFv VH L11S mIgA WH WCH2 T4CH3
Nucleotide sequence:
aagcttgccgccatggtatccacagctcagttccttgggttgctgctgctgtggcttacaggtggcagatgtgacatccagatgactca
gtctccagcctccctatctgcatctgtgggagagactgtcaccatcacatgtcgaacaagtgaaaatgtttacagttatttggcttggtat
cagcagaaacagggaaaatctcctcagctcctggtctcttttgcaaaaaccttagcagaaggtgtgccatcaaggttcagtggcagtg
gatcaggcacacagttttctctgaagatcagcagcctgcagcctgaagattctggaagttatttctgtcaacatcattccgataatccgtg
gacgttcggtggaggcaccgaactggagatcaaaggtggcggtggctcgggcggtggtgggtcgggtggcggcggatcgtcag
cggtccagctgcagcagtctggacctgagtcggaaaagcctggcgcttcagtgaagatttcctgcaaggcttctggttactcattcact
ggctacaatatgaactgggtgaagcagaataatggaaagagccttgagtggattggaaatattgatccttattatggtggtactacctac
aaccggaagttcaagggcaaggccacattgactgtagacaaatcctccagcacagcctacatgcagctcaagagtctgacatctga
ggactctgcagtctattactgtgcaagatcggtcggccctatggactactggggtcaaggaacctcagtcaccgtctcttctgatcacat
ctgttctcctcctactactcctcctccaccttcctgccagcccagcctgtcactgcagcggccagctcttgaggacctgctcctgggttc
agatgccagcatcacatgtactctgaatggcctgagagatcctgagggagctgtcttcacctgggagccctccactgggaaggatgc
agtgcagaagaaagctgtgcagaattcctgcggctgctacagtgtgtccagcgtcctgcctggctgtgctgagcgctggaacagtgg
cgcatcattcaagtgcacagttacccatcctgagtctgacaccttaactggcacaattgccaaagtcacagtgaacaccttcccacccc
aggtccacctgctaccgccgccgtcggaggagctggccctgaatgagctcgtgtccctgacatgcctggtgcgagctttcaacccta
aagaagtgctggtgcgatggctgcatggaaatgaggagctgtccccagaaagctacctagtgtttgagcccctaaaggagccaggc
gagggagccaccacctacctggtgacaagcgtgttgcgtgtatcagctgaaatctggaaacagggtgaccagtactcctgcatggtg
ggccacgaggccttgcccatgaacttcacccagaagaccatcgaccgtctgtcgggtaaacccaccaatgtcagcgtgtctgtgatc
atgtcagagggagattgataatctagat
Amino acid sequence:
mvstaqflgllllwltggrcdiqmtqspaslsasvgetvtitcrtsenvysylawyqqkqgkspqllvsfaktlaegvpsrfsgsgs
gtqfslkisslqpedsgsyfcqhhsdnpwtfgggteleikggggsggggsggggssavqlqqsgpesekpgasvkisckasgys
ftgynmnwvkqnngkslewignidpyyggttynrkfkgkatltvdkssstaymqlksltsedsavyycarsvgpmdywgqg
tsvtvssdhicsppttppppscqpslslqrpaledlllgsdasitctlnglrdpegavftwepstgkdavqkkavqnscgcysvssv
lpgcaerwnsgasfkctvthpesdtltgtiakvtvntfppqvhllpppseelalnelvsltclvrafnpkevlvrwlhgneelspesy
lvfeplkepgegattylvtsvlrvsaeiwkqgdqyscmvghealpmnftqktidrlsgkptnvsvsvimsegd
83. G28-1 scFv Vh L11S hIgE CH2 CH3 CH4
Nucleotide sequence:
aagcttgccgccatggtatccacagctcagttccttgggttgctgctgctgtggcttacaggtggcagatgtgacatccagatgactca
gtctccagcctccctatctgcatctgtgggagagactgtcaccatcacatgtcgaacaagtgaaaatgtttacagttatttggcttggtat
cagcagaaacagggaaaatctcctcagctcctggtctcttttgcaaaaaccttagcagaaggtgtgccatcaaggttcagtggcagtg
gatcaggcacacagttttctctgaagatcagcagcctgcagcctgaagattctggaagttatttctgtcaacatcattccgataatccgtg
gacgttcggtggaggcaccgaactggagatcaaaggtggcggtggctcgggcggtggtgggtcgggtggcggcggatcgtcag
cggtccagctgcagcagtctggacctgagtcggaaaagcctggcgcttcagtgaagatttcctgcaaggcttctggttactcattcact
ggctacaatatgaactgggtgaagcagaataatggaaagagccttgagtggattggaaatattgatccttattatggtggtactacctac
aaccggaagttcaagggcaaggccacattgactgtagacaaatcctccagcacagcctacatgcagctcaagagtctgacatctga
ggactctgcagtctattactgtgcaagatcggtcggccctatggactactggggtcaaggaacctcagtcaccgtctcttctgatcacg
tctgctccagggacttcaccccgcccaccgtgaagatcttacagtcgtcctgcgacggcggcgggcacttccccccgaccatccag
ctcctgtgcctcgtctctgggtacaccccagggactatcaacatcacctggctggaggacgggcaggtcatggacgtggacttgtcc
accgcctctaccacgcaggagggtgagctggcctccacacaaagcgagctcaccctcagccagaagcactggctgtcagaccgc
acctacacctgccaggtcacctatcaaggtcacacctttgaggacagcaccaagaagtgtgcagattccaacccgagaggggtgag
cgcctacctaagccggcccagcccgttcgacctgttcatccgcaagtcgcccacgatcacctgtctggtggtggacctggcacccag
caaggggaccgtgaacctgacctggtcccgggccagtgggaagcctgtgaaccactccaccagaaaggaggagaagcagcgca
atggcacgttaaccgtcacgtccaccctgccggtgggcacccgagactggatcgagggggagacctaccagtgcagggtgaccc
acccccacctgcccagggccctcatgcggtccacgaccaagaccagcggcccgcgtgctgccccggaagtctatgcgtttgcgac
gccggagtggccggggagccgggacaagcgcaccctcgcctgcctgatccagaacttcatgcctgaggacatctcggtgcagtg
gctgcacaacgaggtgcagctcccggacgcccggcacagcacgacgcagccccgcaagaccaagggctccggcttcttcgtctt
cagccgcctggaggtgaccagggccgaatgggagcagaaagatgagttcatctgccgtgcagtccatgaggcagcgagcccctc
acagaccgtccagcgagcggtgtctgtaaatcccggtaaatgataatctaga
Amino acid sequence:
mvstaqflgllllwltggrcdiqmtqspaslsasvgetvtitcrtsenvysylawyqqkqgkspqllvsfaktlaegvpsrfsgsgs
gtqfslkisslcipedsgsyfcqhhsdnpwtfgggteleikggggsggggsggggssavqlqqsgpesekpgasvkisckasgys
ftgynmnwvkqnngkslewignidpyyggttynrktkgkatltvdkssstaymqlksltsedsavyycarsvgpmdywgqg
tsvtvssdhvcsrdftpptvkilqsscdggghfpptiqllclvsgytpgtinitwledgqvmdvdlstasttqegelastqseltlsqk
hwlsdrtytcqvtyqghtfedstkkcadsnprgvsaylsrpspfdlfirksptitclvvdlapskgtvnltwsrasgkpvnhstrkee
kqrngtltvtstlpvgtrdwiegetyqcrvthphlpralmrsttktsgpraapevyafatpewpgsrdkrtlacliqnfmpedisvq
wlhnevqlpdarhsttqprktkgsgttvfsrlevtraeweqkdeficravheaaspsqtvqravsvnpgk
84. G28-1 scFv VH L11S hIgA WH WCH2 T4CH3
Nucleotide sequence:
atggtatccacagctcagttccttgggttgctgctgctgtggcttacaggtggcagatgtgacatccagatgactcagtctccagcctcc
ctatctgcatctgtgggagagactgtcaccatcacatgtcgaacaagtgaaaatgtttacagttatttggcttggtatcagcagaaacag
ggaaaatctcctcagctcctggtctcttttgcaaaaaccttagcagaaggtgtgccatcaaggttcagtggcagtggatcaggcacac
agttttctctgaagatcagcagcctgcagcctgaagattctggaagttamctgtcaacatcattccgataatccgtggacgttcggtgg
aggcaccgaactggagatcaaaggtggcggtggctcgggcggtggtgggtcgggtggcggcggatcgtcagcggtccagctgc
agcagtctggacctgagtcggaaaagcctggcgcttcagtgaagatttcctgcaaggcttctggttactcattcactggctacaatatg
aactgggtgaagcagaataatggaaagagccttgagtggattggaaatattgatccttattatggtggtactacctacaaccggaagtt
caagggcaaggccacattgactgtagacaaatcctccagcacagcctacatgcagctcaagagtctgacatctgaggactctgcagt
ctattactgtgcaagatcggtcggccctatggactactggggtcaaggaacctcagtcaccgtctcttctgatcagccagttccctcaa
ctccacctaccccatctccctcaactccacctaccccatctccctcatgctgccacccccgactgtcactgcaccgaccggccctcga
ggacctgctcttaggttcagaagcgatcctcacgtgcacactgaccggcctgagagatgcctcaggtgtcaccttcacctggacgcc
ctcaagtgggaagagcgctgttcaaggaccacctgaccgtgacctctgtggctgctacagcgtgtccagtgtcctgccgggctgtgc
cgagccatggaaccatgggaagacct.tcacttgcactgctgcctaccccgagtccaagaccccgctaaccgccaccctctcaaaatc
cggaaacacattccggcccgaggtccacctgctgccgccgccgtcggaggagctggccctgaacgagctggtgacgctgacgtg
cctggcacgtggcttcagccccaaggatgtgctggttcgctggctgcaggggtcacaggagctgccccgcgagaagtacctgactt
gggcatcccggcaggagcccagccagggcaccaccaccttcgctgtgaccagcatactgcgcgtggcagccgaggactggaag
aagggggacaccttctcctgcatggtgggccacgaggccctgccgctggccttcacacagaagaccatcgaccgcttggcgggta
aacccacccatgtcaatgtgtctgttgtcatggcggaggtggactgataatctaga
Amino acid sequence:
mvstaqflgllllwltggrcdiqmtqspaslsasvgetvtitcrtsenvysylawyqqkqgkspqllvsfaktlaegvpsrfsgsgs
gtqfslkisslqpedsgsyfcqhhsdnpwtfgggteleikggggsggggsggggssavqlqqsgpesekpgasvkisckasgys
ftgynmnwvkqnngkslewignidpyyggttynrkfkgkatltvdkssstaymqlksltsedsavyycarsvgpmdywgqg
tsvtvssdqpvpstpptpspstpptpspscchprlslhrpaled
85. HD37 VL
Nucleotide sequence:
aagcttgccgccatggagacagacacactcctgctatgggtgctgctgctctgggttccaggctccactggtgacattgtgctgaccc
aatctccagcttctttggctgtgtctctagggcagagggccaccatctcctgcaaggccagccaaagtgttgattatgatggtgatagtt
atttgaactggtaccaacagattccaggacagccacccaaactcctcatctatgatgcatccaatctagtttctgggatcccacccaggt
ttagtggcagtgggtctgggacagacttcaccctcaacatccatcctgtggagaaggtggatgctgcaacctatcactgtcagcaaag
tactgaggatccgtggacgttcggtggaggcaccaagctggaaatcaaaggtggcggtggctcgggcggtggtgggtcgggtgg
cggcgggagctcg
Amino acid sequence:
metdtlllwvlllwvpgstgdivltqspaslavslgqratisckasqsvdydgdsylnwyqqipgqppklliydasnlvsgipprf
sgsgsgtdftlnihpvekvdaatyhcqqstedpwtfgggtkleikggggsggggsggggss
86. HD37 VH
Nucleotide sequence:
gggagctcgcaggttcagctgcagcagtctggggctgagctggtgaggcctgggtcctcagtgaagatttcctgcaaggcttctggc
tatgcattcagtagctactggatgaactgggtgaagcagaggcctggacagggtcttgagtggattggacagatttggcctggagat
ggtgatactaactacaatggaaagttcaagggtaaagccactctgactgcagacgaatcctccagcacagcctacatgcaactcagc
agcctagcatctgaggactctgcggtctatttctgtgcaagacgggagactacgacggtaggccgttattactatgctatggactactg
gggtcaaggaacctcagtcaccgtctcctctgatcag
Amino acid sequence:
(gss)qvqlqqsgaelvrpgssvkisckasgyafssywmnwvkqrpgqglewigqiwpgdgdtnyngkfkgkatltadesss
taymqlsslasedsavyfcarretttvgryyyamdywgqgtsvtvssdq
87. HD37 scFv
Nucleotide sequence:
aagcttgccgccatggagacagacacactcctgctatgggtgctgctgctctgggttccaggctccactggtgacattgtgctgaccc
aatctccagcttctttggctgtgtctctagggcagagggccaccatctcctgcaaggccagccaaagtgttgattatgatggtgatagtt
atttgaactggtaccaacagattccaggacagccacccaaactcctcatctatgatgcatccaatctagtttctgggatcccacccaggt
ttagtggcagtgggtctgggacagacttcaccctcaacatccatcctgtggagaaggtggatgctgcaacctatcactgtcagcaaag
tactgaggatccgtggacgttcggtggaggcaccaagctggaaatcaaaggtggcggtggctcgggcggtggtgggtcgggtgg
cggcggatcgtcacaggttcagctgcagcagtctggggctgagctggtgaggcctgggtcctcagtgaagatttcctgcaaggcttc
tggctatgcattcagtagctactggatgaactgggtgaagcagaggcctggacagggtcttgagtggattggacagatttggcctgg
agatggtgatactaactacaatggaaagttcaagggtaaagccactctgactgcagacgaatcctccagcacagcctacatgcaact
cagcagcctagcatctgaggactctgcggtctatttctgtgcaagacgggagactacgacggtaggccgttattactatgctatggact
actggggtcaaggaacctcagtcaccgtctcctctgatcag
Amino acid sequence:
metdtlllwvlllwvpgstgdivltqspaslavslgqratisckasqsvdydgdsylnwyqqipgqppklliydasnlvsgipprf
sgsgsgtdfilnihpvekvdaatyhcqqstedpwtfgggtkleikggggsggggsggggssqvqlqqsgaelvrpgssvkisck
asgyafssywmnwvkqrpgqglewigqiwpgdgdtnyngkfkgkatltadessstaymqlsslasedsavyfcarretttvgr
yyyamdywgqgtsvtvssdq
88. HD37 VHL11S:
Nucleotide sequence:
gggagctcgcaggttcagctgcagcagtctggggctgagtcggtgaggcctgggtcctcagtgaagatttcctgcaaggcttctggc
tatgcattcagtagctactggatgaactgggtgaagcagaggcctggacagggtcttgagtggattggacagatttggcctggagat
ggtgatactaactacaatggaaagttcaagggtaaagccactctgactgcagacgaatcctccagcacagcctacatgcaactcagc
agcctagcatctgaggactctgcggtctatttctgtgcaagacgggagactacgacggtaggccgttattactatgctatggactactg
gggtcaaggaacctcagtcaccgtctcctctgatcag
Amino acid sequence:
(gss)qvqlqqsgaesvrpgssvkisckasgyafssywmnwvkqrpgqglewigqiwpgdgdtnyngkfkgkatltadess
staymqlsslasedsavyfcarretttvgryyyamdywgqgtsvtvssdq
89. HD37 scFv VHL11S:
Nucleotide sequence:
Aagcttgccgccatggagacagacacactcctgctatgggtgctgctgctctgggttccaggctccactggtgacattgtgctgacc
caatctccagcttctttggctgtgtctctagggcagagggccaccatctcctgcaaggccagccaaagtgttgattatgatggtgatagt
tatttgaactggtaccaacagattccaggacagccacccaaactcctcatctatgatgcatccaatctagtttctgggatcccacccagg
tttagtggcagtgggtctgggacagacttcaccctcaacatccatcctgtggagaaggtggatgctgcaacctatcactgtcagcaaa
gtactgaggatccgtggacgttcggtggaggcaccaagctggaaatcaaaggtggcggtggctcgggcggtggtgggtcgggtg
gcggcgggagctcgcaggttcagctgcagcagtctggggctgagtcggtgaggcctgggtcctcagtgaagatttcctgcaaggct
tctggctatgcattcagtagctactggatgaactgggtgaagcagaggcctggacagggtcttgagtggattggacagatttggcctg
gagatggtgatactaactacaatggaaagttcaagggtaaagccactctgactgcagacgaatcctccagcacagcctacatgcaac
tcagcagcctagcatctgaggactctgcggtctatttctgtgcaagacgggagactacgacggtaggccgttattactatgctatggac
tactggggtcaaggaacctcagtcaccgtctcctctgatcag
Amino acid sequence:
metdtlllwvlllwvpgstgdivltqspaslavslgqratisckasqsvdydgdsylnwyqqipgqppklliydasnlvsgipprf
sgsgsgtdftlnihpvekvdaatyhcqqstedpwtfgggtkleikggggsggggsggggssqvqlqqsgaesvrpgssvkisck
asgyafssywmnwvkqrpgqglewigqiwpgdgdtnyngkfkgkatltadessstaymqlsslasedsavyfcarretttvgr
yyyamdywgqgtsvtvssdq
90. HD37 scFv IgAH hIgG1 WCH2 T4CH3
Nucleotide sequence
aagcttgccgccatggagacagacacactcctgctatgggtgctgctgctctgggttccaggctccactggtgacattgtgctgaccc
aatctccagcttctttggctgtgtctctagggcagagggccaccatctcctgcaaggccagccaaagtgttgattatgatggtgatagtt
atttgaactggtaccaacagattccaggacagccacccaaactcctcatctatgatgcatccaatctagtttctgggatcccacccaggt
ttagtggcagtgggtctgggacagacttcaccctcaacatccatcctgtggagaaggtggatgctgcaacctatcactgtcagcaaag
tactgaggatccgtggacgttcggtggaggcaccaagctggaaatcaaaggtggcggtggctcgggcggtggtgggtcgggtgg
cggcgggagctcgcaggttcagctgcagcagtctggggctgagtcggtgaggcctgggtcctcagtgaagatttcctgcaaggctt
ctggctatgcattcagtagctactggatgaactgggtgaagcagaggcctggacagggtcttgagtggattggacagatttggcctg
gagatggtgatactaactacaatggaaagttcaagggtaaagccactctgactgcagacgaatcctccagcacagcctacatgcaac
tcagcagcctagcatctgaggactctgcggtctatttctgtgcaagacgggagactacgacggtaggccgttattactatgctatggac
tactggggtcaaggaacctcagtcaccgtctcctctgatcagccagttccctcaactccacctaccccatctccctcaactccacctac
cccatctccctcatgctgccacccccgactgtcactgcaccgaccggccctcgaggacctgctcttaggttcagaagcgatcctcac
gtgcacactgaccggcctgagagatgcctcaggtgtcaccttcacctggacgccctcaagtgggaagagcgctgttcaaggaccac
ctgaccgtgacctctgtggctgctacagcgtgtccagtgtcctgccgggctgtgccgagccatggaaccatgggaagaccttcactt
gcactgctgcctaccccgagtccaagaccccgctaaccgccaccctctcaaaatccggaaacacattccggcccgaggtccacctg
ctgccgccgccgtcggaggagctggccctgaacgagctggtgacgctgacgtgcctggcacgtggcttcagccccaaggatgtgc
tggttcgctggctgcaggggtcacaggagctgccccgcgagaagtacctgacttgggcatcccggcaggagcccagccagggca
ccaccaccttcgctgtgaccagcatactgcgcgtggcagccgaggactggaagaagggggacaccttctcctgcatggtgggcca
cgaggccctgccgctggccttcacacagaagaccatcgaccgcttggcgggtaaacccacccatgtcaatgtgtctgttgtcatggc
ggaggtggactgataatctaga
Amino acid sequence
metdtlllwvlllwvpgstgdivltqspaslavslgqratisckasqsvdydgdsylnwyqqipgqppklliydasnlvsgipprf
sgsgsgtdftlnihpvekvdaatyhcqqstedpwtfgggtkleikggggsggggsggggssqvqlqqsgaesvrpgssvkisck
asgyafssywmnwvkqrpgqglewigqiwpgdgdtnyngkfkgkatltadessstaymqlsslasedsavyfcarretttvgr
yyyamdywgqgtsvtvssdqpvpstpptpspstpptpspscchprlslhrpaledlllgseailtctltglrdasgvtftwtpssgks
avqgppdrdlcgcysvssvlpgcaepwnhgktftctaaypesktpltatlsksgntfrpevhllpppseelalnelvtltclargfsp
kdvlvrwlqgsqelprekyltwasrqepsqgtttfavtsilrvaaedwkkgdtfscmvghealplaftqktidrlagkpthvnvsv
vmaevd
91. HD37 scFv (SSS-S)H WCH2 WCH3
Nucleotide sequence:
aagcttgccgccatggagacagacacactcctgctatgggtgctgctgctctgggttccaggctccactggtgacattgtgctgaccc
aatctccagcttctttggctgtgtctctagggcagagggccaccatctcctgcaaggccagccaaagtgttgattatgatggtgatagtt
atttgaactggtaccaacagattccaggacagccacccaaactcctcatctatgatgcatccaatctagtttctgggatcccacccaggt
ttagtggcagtgggtctgggacagacttcaccctcaacatccatcctgtggagaaggtggatgctgcaacctatcactgtcagcaaag
tactgaggatccgtggacgttcggtggaggcaccaagctggaaatcaaaggtggcggtggctcgggcggtggtgggtcgggtgg
cggcggatcgtcacaggttcagctgcagcagtctggggctgagctggtgaggcctgggtcctcagtgaagatttcctgcaaggcttc
tggctatgcattcagtagctactggatgaactgggtgaagcagaggcctggacagggtcttgagtggattggacagatttggcctgg
agatggtgatactaactacaatggaaagttcaagggtaaagccactctgactgcagacgaatcctccagcacagcctacatgcaact
cagcagcctagcatctgaggactctgcggtctatttctgtgcaagacgggagactacgacggtaggccgttattactatgctatggact
actggggtcaaggaacctcagtcaccgtctcctctgatcaggagcccaaatcttctgacaaaactcacacatccccaccgtcctcagc
acctgaactcctgggtggaccgtcagtcttcctcttccccccaaaacccaaggacaccctcatgatctcccggacccctgaggtcaca
tgcgtggtggtggacgtgagccacgaagaccctgaggtcaagttcaactggtacgtggacggcgtggaggtgcataatgccaaga
caaagccgcgggaggagcagtacaacagcacgtaccgtgtggtcagcgtcctcaccgtcctgcaccaggactggctgaatggcaa
ggagtacaagtgcaaggtctccaacaaagccctcccagcccccatcgagaaaaccatctccaaagccaaagggcagccccgaga
accacaggtgtacaccctgcccccatcccgggatgagctgaccaagaaccaggtcagcctgacctgcctggtcaaaggcttctatc
caagcgacatcgccgtggagtgggagagcaatgggcagccggagaacaactacaagaccacgcctcccgtgctggactccgac
ggctccttcttcctctacagcaagctcaccgtggacaagagcaggtggcagcaggggaacgtcttctcatgctccgtgatgcatgag
gctctgcacaaccactacacgcagaagagcctctccctgtctccgggtaaatgatctaga
Amino acid sequence:
metdtlllwvlllwvpgstgdivltqspaslavslgqratisckasqsvdydgdsylnwyqqipgqppklliydasnlvsgipprf
sgsgsgtdftlnihpvekvdaatyhcqqstedpwtfgggtkleikggggsggggsggggssqvqlqqsgaelvrpgssvkisck
asgyafssywmnwvkqrpgqglewigqiwpgdgdtnyngkflgkatltadessstaymqlsslasedsavyfcarretttvgr
yyyamdywgqgtsvtvssdqepkssdkthtsppssapellggpsvflfppkpkdtlmisrtpevtcvvvdvshedpevkfnw
yvdgvevhnaktkpreeqynstyrvvsvltvlhqdwlngkeykckvsnkalpapiektiskakgqprepqvytlppsrdeltk
nqvsltclvkgfypsdiavewesngqpennykttppvldsdgsttlyskltvdksrwqqgnvfscsvmhealhnhytqkslsls
pgk
92. HD37 scFv VH L11S (SSS-S)H WCH2 WCH3
Nucleotide sequence:
aagcttgccgccatggagacagacacactcctgctatgggtgctgctgctctgggttccaggctccactggtgacattgtgctgaccc
aatctccagcttctttggctgtgtctctagggcagagggccaccatctcctgcaaggccagccaaagtgttgattatgatggtgatagtt
atttgaactggtaccaacagattccaggacagccacccaaactcctcatctatgatgcatccaatctagtttctgggatcccacccaggt
ttagtggcagtgggtctgggacagacttcaccctcaacatccatcctgtggagaaggtggatgctgcaacctatcactgtcagcaaag
tactgaggatccgtggacgttcggtggaggcaccaagctggaaatcaaaggtggcggtggctcgggcggtggtgggtcgggtgg
cggcgggagctcgcaggttcagctgcagcagtctggggctgagtcggtgaggcctgggtcctcagtgaagatttcctgcaaggctt
ctggctatgcattcagtagctactggatgaactgggtgaagcagaggcctggacagggtcttgagtggattggacagatttggcctg
gagatggtgatactaactacaatggaaagttcaagggtaaagccactctgactgcagacgaatcctccagcacagcctacatgcaac
tcagcagcctagcatctgaggactctgcggtctatttctgtgcaagacgggagactacgacggtaggccgttattactatgctatggac
tactggggtcaaggaacctcagtcaccgtctcctctgatcaggagcccaaatcttctgacaaaactcacacatccccaccgtcctcag
cacctgaactcctggggggaccgtcagtcttcctcttccccccaaaacccaaggacaccctcatgatctcccggacccctgaggtca
catgcgtggtggtggacgtgagccacgaagaccctgaggtcaagttcaactggtacgtggacggcgtggaggtgcataatgccaa
gacaaagccgcgggaggagcagtacaacagcacgtaccgtgtggtcagcgtcctcaccgtcctgcaccaggactggctgaatgg
caaggagtacaagtgcaaggtctccaacaaagccctcccagcccccatcgagaaaacaatctccaaagccaaagggcagccccg
agaaccacaggtgtacaccctgcccccatcccgggatgagctgaccaagaaccaggtcagcctgacctgcctggtcaaaggcttct
atcccagcgacatcgccgtggagtgggagagcaatgggcagccggagaacaactacaagaccacgcctcccgtgctggactccg
acggctccttcttcctctacagcaagctcaccgtggacaagagcaggtggcagcaggggaacgtcttctcatgctccgtgatgcatg
aggctctgcacaaccactacacgcagaagagcctctccctgtctccgggtaaatgatctaga
Amino acid sequence:
metdtlllwvlllwvpgstgdivltqspaslavslgqratisckasqsvdydgdsylnwyqqipgqppklliydasnlvsgipprf
sgsgsgtdftlnihpvekvdaatyhcqqstedpwtfgggtkleikggggsggggsggggssqvqlqqsgaesvrpgssvkisck
asgyafssywmnwvkqrpgqglewigqiwpgdgdtnyngkfkgkatltadessstaymqlsslasedsavyfcarretttvgr
yyyamdywgqgtsvtvssdqepkssdkthtsppssapellggpsvflfppkpkdtlmisrtpevtcvvvdvshedpevkfnw
yvdgvevhnaktkpreeqynstyrvvsvltvlhqdwlngkeykckvsnkalpapiektiskakgqprepqvytlppsrdeltk
nqvsltclvkgfypsdiavewesngqpennykttppvldsdgsttlyskltvdksrwqqgnvfscsvmhealhnhytqkslsls
pgk
91. L6 VL
Nucleotide sequence:
atggattttcaagtgcagattttcagcttcctgctaatcagtgcttcagtcataatgtccagaggacaaattgttctctcccagtctccagc
aatcctgtctgcatctccaggggagaaggtcacattgacttgcagggccagctcaagtgtaagtttcatgaactggtaccagcagaag
ccaggatcctcccccaaaccctggatttatgccacatccaatttggcttctgagttccctggtcgcttcagtggcgagtggtctgggacc
tcttactctctcgcaatcagcagagtggaggctgaagatgctgccacttattactgccagcagtggaatagtaacccactcacgttcgg
tgctgggaccaagctggagctgaaagagctctctggtggcggtggctcgggcggtggtgggtcgggtggcggcggatct
Amino acid sequence:
Mdfqvqifsflhisasvimsrgqivlsqspailsaspgekvtltcrasssvsfmnwyqqkpgsspkpwiyatsnlasefpgrfsge
wsgtsyslaisrveaedaatyycqqwnsnpltfgagtklelkelsggggsggggsggggs
92. L6 VH
Nucleotide sequence:
cagatccagttggtgcagtctggacctgagctgaagaagcctggagagacagtcaagatctcctgcaaggcttctgggtataccttca
caaactatggaatgaactgggtgaagcaggctccaggaaagggtttaaagtggatgggctggataaacacctacactggacagcca
acatatgctgatgacttcaagggacggtttgccttctctttggaaacctctgcctacactgcctatttgcagatcaacaacctcaaaaatg
aggacatggctacatatttctgtgcaagatttagctatggtaactcacgttacgctgactactggggccaaggcaccactctcacagtct
cctctgatca
Amino acid sequence:
qiqlvqsgpelkkpgetvkisckasgytftnygmnwvkqapgkglkwmgwintytgqptyaddfkgrfafsletsaytaylqi
nnlknedmatyfcarfsygnsryadywgqgttltvssd
93. L6 scFv
Nucleotide sequence:
atggattttcaagtgcagattttcagcttcctgctaatcagtgcttcagtcataatgtccagaggacaaattgttctctcccagtctccagc
aatcctgtctgcatctccaggggagaaggtcacattgacttgcagggccagctcaagtgtaagtttcatgaactggtaccagcagaag
ccaggatcctcccccaaaccctggatttatgccacatccaatttggcttctgagttccctggtcgcttcagtggcgagtggtctgggacc
tcttactctctcgcaatcagcagagtggaggctgaagatgctgccacttattactgccagcagtggaatagtaacccactcacgttcgg
tgctgggaccaagctggagctgaaagagctctctggtggcggtggctcgggcggtggtgggtcgggtggcggcggatctctgcag
atccagttggtgcagtctggacctgagctgaagaagcctggagagacagtcaagatctcctgcaaggcttctgggtataccttcacaa
actatggaatgaactgggtgaagcaggctccaggaaagggtttaaagtggatgggctggataaacacctacactggacagccaaca
tatgctgatgacttcaagggacggtttgccttctctttggaaacctctgcctacactgcctatttgcagatcaacaacctcaaaaatgagg
acatggctacatatttctgtgcaagatttagctatggtaactcacgttacgctgactactggggccaaggcaccactctcacagtctcct
ctgatca
Amino acid sequence:
mdfqvqifsflhisasvimsrgqivlsqspailsaspgekvtltcrasssvsfmnwyqqkpgsspkpwiyatsnlasefpgrfsge
wsgtsyslaisrveaedaatyycqqwnsnpltfgagtklelkelsggggsggggsggggslqiqlvqsgpelkkpgetvkiscka
sgytftnygmnwvkqapgkglkwmgwintytgqptyaddfkgrfafsletsaytaylqinnlknedmatyfcarfsygnsry
adywgqgttltvssd
94. L6 VHL11S
Nucleotide sequence;
ctgcagatccagttggtgcagtctggacctgagtcgaagaagcctggagagacagtcaagatctcctgcaaggcttctgggtatacct
tcacaaactatggaatgaactgggtgaagcaggctccaggaaagggtttaaagtggatgggctggataaacacctacactggacag
ccaacatatgctgatgacttcaagggacggtttgccttctctttggaaacctctgcctacactgcctatttgcagatcaacaacctcaaaa
atgaggacatggctacatatttctgtgcaagatttagctatggtaactcacgttacgctgactactggggccaaggcaccactctcaca
gtctcctctgatca
Amino acid sequence:
qiqlvqsgpeskkpgetvkisckasgytftnygmnwvkqapgkglkwmgwintytgqptyaddfkgrfafsletsaytaylqi
nnlknedmatyfcarfsygnsryadywgqgttltvssd
95. L6 VH L11S scFv
Nucleotide sequence;
Aagcttgttgttatggattttcaagtgcagattttcagcttcctgctaatcagtgcttcagtcataatgtccagaggacaaattgttctctcc
cagtctccagcaatcctgtctgcatctccaggggagaaggtcacattgacttgcagggccagctcaagtgtaagtttcatgaactggta
ccagcagaagccaggatcctcccccaaaccctggatttatgccacatccaatttggcttctgagttccctggtcgcttcagtggcgagt
ggtctgggacctcttactctctcgcaatcagcagagtggaggctgaagatgctgccacttattactgccagcagtggaatagtaaccc
actcacgttcggtgctgggaccaagctggagctgaaagagctctctggtggcggtggctcgggcggtggtgggtcgggtggcggc
ggatctctgcagatccagttggtgcagtctggacctgagtcgaagaagcctggagagacagtcaagatctcctgcaaggcttctggg
tataccttcacaaactatggaatgaactgggtgaagcaggctccaggaaagggtttaaagtggatgggctggataaacacctacact
ggacagccaacatatgctgatgacttcaagggacggtttgccttctctttggaaacctctgcctacactgcctatttgcagatcaacaac
ctcaaaaatgaggacatggctacatatttctgtgcaagatttagctatggtaactcacgttacgctgactactggggccaaggcaccac
tctcacagtctcctctgatca
Amino acid sequence:
mdfqvqifsflhisasvimsrgqivisqspaiisaspgekvtltcrasssvsfmnwyqqkpgsspkpwiyatsniasefpgrfsge
wsgtsyslaisrveaedaatyycqqwnsnphfgagtklelkelsggggsggggsggggslqiqlvqsgpeskkpgetvkiscka
sgytftnygmnwvkqapgkglkwmgwintytgqptyaddfkgrfafsletsaytaylqinniknedmatyfcarfsygnsry
adywgqgttitvssd
96. L6 Or L6 VHL11S scFv IgAH hIgGI WCH2 WCH3
Nucleotide sequence: (L6 VHL11S is shown)
aagcttgttgttatggattttcaagtgcagattttcagcttcctgctaatcagtgcttcagtcataatgtccagaggacaaattgttctctccc
agtctccagcaatcctgtctgcatctccaggggagaaggtcacattgacttgcagggccagctcaagtgtaagtttcatgaactggtac
cagcagaagccaggatcctcccccaaaccctggatttatgccacatccaatttggcttctgagttccctggtcgcttcagtggcgagtg
gtctgggacctcttactctctcgcaatcagcagagtggaggctgaagatgctgccacttattactgccagcagtggaatagtaaccca
ctcacgttcggtgctgggaccaagctggagctgaaagagctctctggtggcggtggctcgggcggtggtgggtcgggtggcggcg
gatctctgcagatccagttggtgcagtctggacctgagtcgaagaagcctggagagacagtcaagatctcctgcaaggcttctgggt
ataccttcacaaactatggaatgaactgggtgaagcaggctccaggaaagggtttaaagtggatgggctggataaacacctacactg
gacagccaacatatgctgatgacttcaagggacggtttgccttctctttggaaacctctgcctacactgcctatttgcagatcaacaacct
caaaaatgaggacatggctacatatttctgtgcaagatttagctatggtaactcacgttacgctgactactggggccaaggcaccactc
tcacagtctcctctgatcagccagttccctcaactccacctaccccatctccctcaactccacctaccccatctccctcatgcgcacctg
aactcctggggggaccgtcagtcttcctcttccccccaaaacccaaggacaccctcatgatctcccggacccctgaggtcacatgcg
tggtggtggacgtgagccacgaagaccctgaggtcaagttcaactggtacgtggacggcgtggaggtgcataatgccaagacaaa
gccgcgggaggagcagtacaacagcacgtaccgtgtggtcagcgtcctcaccgtcctgcaccaggactggctgaatggcaagga
gtacaagtgcaaggtctccaacaaagccctcccagcccccatcgagaaaacaatctccaaagccaaagggcagccccgagaacc
acaggtgtacaccctgcccccatcccgggatgagctgaccaagaaccaggtcagcctgacctgcctggtcaaaggcttctatccca
gcgacatcgccgtggagtgggagagcaatgggcagccggagaacaactacaagaccacgcctcccgtgctggactccgacggct
ccttcttcctctacagcaagctcaccgtggacaagagcaggtggcagcaggggaacgtcttctcatgctccgtgatgcatgaggctct
gcacaaccactacacgcagaagagcctctccctgtctccgggtaaatgatctaga
Amino acid sequence:
mdfqvqifsflhisasvimsrgqivlsqspailsaspgekvtltcrasssvsfmnwyqqkpgsspkpwiyatsnlasefpgrfsge
wsgtsyslaisrveaedaatyycqqwnsnpltfgagtklelkelsggggsggggsggggslqiqlvqsgpeskkpgetvkiscka
sgytftnygmnwvkqapgkglkwmgwintytgqptyaddfkgrfafsletsaytaylqinnlknedmatyfcarfsygnsry
adywgqgttlvssdqpvpstpptpspstpptpspscapellggpsvflfppkpkdtlmisrtpevtcvvvdvshedpevkfnw
yvdgvevhnaktkpreeqynstyrvvsvitvihqdwlngkeykckvsnkalpapiektiskakgqprepqvytlppsrdeltk
nqvsltclvkgfypsdiavewesngcipennykttppvldsdgsttlyskltvdksrwqqgnvfscsvmhealhnhytqkslsls
pgk
97. L6 scFv VHL11S (SSS-S)H WCH2 WCH3
Nucleotide sequence:
aagcttgttgttatggattttcaagtgcagattttcagcttcctgctaatcagtgcttcagtcataatgtccagaggacaaattgttctctccc
agtctccagcaatcctgtctgcatctccaggggagaaggtcacattgacttgcagggccagctcaagtgtaagtttcatgaactggtac
cagcagaagccaggatcctcccccaaaccctggatttatgccacatccaatttggcttctgagttccctggtcgcttcagtggcgagtg
gtctgggacctcttactctctcgcaatcagcagagtggaggctgaagatgctgccacttattactgccagcagtggaatagtaaccca
ctcacgttcggtgctgggaccaagctggagctgaaagagctctctggtggcggtggctcgggcggtggtgggtcgggtggcggcg
gatctctgcagatccagttggtgcagtctggacctgagtcgaagaagcctggagagacagtcaagatctcctgcaaggcttctgggt
ataccttcacaaactatggaatgaactgggtgaagcaggctccaggaaagggtttaaagtggatgggctggataaacacctacactg
gacagccaacatatgctgatgacttcaagggacggtttgccttctctttggaaacctctgcctacactgcctatttgcagatcaacaacct
caaaaatgaggacatggctacatatttctgtgcaagatttagctatggtaactcacgttacgctgactactggggccaaggcaccactc
tcacagtctcctctgatcaggagcccaaatcttctgacaaaactcacacatccccaccgtcctcagcacctgaactcctggggggacc
gtcagtcttcctcttccccccaaaacccaaggacaccctcatgatctcccggacccctgaggtcacatgcgtggtggtggacgtgag
ccacgaagaccctgaggtcaagttcaactggtacgtggacggcgtggaggtgcataatgccaagacaaagccgcgggaggagca
gtacaacagcacgtaccgtgtggtcagcgtcctcaccgtcctgcaccaggactggctgaatggcaaggagtacaagtgcaaggtct
ccaacaaagccctcccagcccccatcgagaaaacaatctccaaagccaaagggcagccccgagaaccacaggtgtacaccctgc
ccccatcccgggatgagctgaccaagaaccaggtcagcctgacctgcctggtcaaaggcttctatcccagcgacatcgccgtggag
tgggagagcaatgggcagccggagaacaactacaagaccacgcctcccgtgctggactccgacggctccttcttcctctacagcaa
gctcaccgtggacaagagcaggtggcagcaggggaacgtcttctcatgctccgtgatgcatgaggctctgcacaaccactacacgc
agaagagcctctccctgtctccgggtaaatgatctaga
Amino acid sequence:
mdfqvqifsflhisasvimsrgqivlsqspailsaspgekvtltcrasssvsfmnwyqqkpgsspkpwiyatsnlasefpgrfsge
wsgtsyslaisrveaedaatyycqqwnsnpltfgagtklelkelsggggsggggsggggslqiqlvqsgpeskkpgetvkiscka
sgytftnygmnwvkqapgkglkwmgwintytgciptyaddfkgrfafsletsaytaylqinnlknedmatyfcarfsygnsry
adywgqgttltvssdqepkssdkthtsppssapellggpsvflfppkpkdtlmisrtpevtcvvvdvshedpevkfnwyvdgv
evhnaktkpreeqynstyrvvsvltvlhqdwlngkeykckvsnkalpapiektiskakgqprepqvytlppsrdeltknqvsitc
lvkgfypsdiavewesngqpennykttppvldsdgsttlyskltvdksrwqqgnvfscsvmhealhnhytqkslsispgk
98. P238 CH2
Nucleotide sequence:
accgtcctgcaccaggactggctgaatggcaaggagtacaagtgcaaggtctccaacaaagccctcccagcccccatcgagaaaa
caatctccaaagccaaa
Amino acid sequence:
pellggssvflfppkpkdtlmisrtpevtcvvvdvshedpevkfnwyvdgvevhnaktkpreeqynstyrvvsvltvlhqdwl
ngkeykckvsnkalpapiektiskak
99. P238 CH2 WCH3
a. P238S CH2 WCH3
Nucleotide sequence:
cctgaactcctggggggatcgtcagtcttcctcttccccccaaaacccaaggacaccctcatgatctcccggacccctgaggtcacat
gcgtggtggtggacgtgagccacgaagaccctgaggtcaagttcaactggtacgtggacggcgtggaggtgcataatgccaagac
aaagccgcgggaggagcagtacaacagcacgtaccgtgtggtcagcgtcctcaccgtcctgcaccaggactggctgaatggcaa
ggagtacaagtgcaaggtctccaacaaagccctcccagcccccatcgagaaaacaatctccaaagccaaagggcagccccgaga
accacaggtgtacaccctgcccccatcccgggatgagctgaccaagaaccaggtcagcctgacctgcctggtcaaaggcttctatc
ccagcgacatcgccgtggagtgggagagcaatgggcagccggagaacaactacaagaccacgcctcccgtgctggactccgac
ggctccttcttcctctacagcaagctcaccgtggacaagagcaggtggcagcaggggaacgtcttctcatgctccgtgatgcatgag
gctctgcacaaccactacacgcagaagagcctctccctgtctccgggtaaatgatctaga
Amino acid sequence:
pellggssvflfppkpkdtlmisrtpevtcvvvdvshedpevkfnwyvdgvevhnaktkpreeqynstyrvvsvltvlhqdwl
ngkeykckvsnkalpapiektiskakgqprepqvytlppsrdeltknqvsltclvkgfypsdiavewesngqpennykttppvl
dsdgsttlyskltvdksrwqqgnvfscsvmhealhnhytqkslslspgk
b. (SSS-S)H P238S CH2 WCH3
Nucleotide sequence:
tgatcaggagcccaaatcttctgacaaaactcacacatccccaccgtcctcagcacctgaactcctggggggatcgtcagtcttcctct
tccccccaaaacccaaggacaccctcatgatctcccggacccctgaggtcacatgcgtggtggtggacgtgagccacgaagaccct
gaggtcaagttcaactggtacgtggacggcgtggaggtgcataatgccaagacaaagccgcgggaggagcagtacaacagcacg
taccgtgtggtcagcgtcctcaccgtcctgcaccaggactggctgaatggcaaggagtacaagtgcaaggtctccaacaaagccct
cccagcccccatcgagaaaacaatctccaaagccaaagggcagccccgagaaccacaggtgtacaccctgcccccatcccggga
tgagctgaccaagaaccaggtcagcctgacctgcctggtcaaaggcttctatcccagcgacatcgccgtggagtgggagagcaatg
ggcagccggagaacaactacaagaccacgcctcccgtgctggactccgacggctccttcttcctctacagcaagctcaccgtggac
aagagcaggtggcagcaggggaacgtcttctcatgctccgtgatgcatgaggctctgcacaaccactacacgcagaagagcctctc
cctgtctccgggtaaatgatctaga
Amino acid sequence:
dqepkssdkthtsppssapellggssvflfppkpkdtlmisrtpevtcvvvdvshedpevkfnwyvdgvevhnaktkpreeqy
nstyrvvsvltvlhqdwlngkeykckvsnkalpapiektiskakgqprepqvytlppsrdeltknqvsltclvkgfypsdiavew
esngqpennykttppvldsdgsttiyskltvdksrwqqgnvfscsvmhealhnhytqkslslspgk*
100. a.CD16-6 low (ED) + NL + (SSS-S)H P238S CH2 WCH3
Nucleotide sequence:
ggagcccaaatcttctgacaaaactcacacatccccaccgtcctcagcacctgaactcctggggggatcgtcagtcttcctcttccccc
caaaacccaaggacaccctcatgatctcccggacccctgaggtcacatgcgtggtggtggacgtgagccacgaagaccctgaggt
caagttcaactggtacgtggacggcgtggaggtgcataatgccaagacaaagccgcgggaggagcagtacaacagcacgtaccg
tgtggtcagcgtcctcaccgtcctgcaccaggactggctgaatggcaaggagtacaagtgcaaggtctccaacaaagccctcccag
cccccatcgagaaaacaatctccaaagccaaagggcagccccgagaaccacaggtgtacaccctgcccccatcccgggatgagc
tgaccaagaaccaggtcagcctgacctgcctggtcaaaggcttctatcccagcgacatcgccgtggagtgggagagcaatgggca
gccggagaacaactacaagaccacgcctcccgtgctggactccgacggctccttcttcctctacagcaagctcaccgtggacaaga
gcaggtggcagcaggggaacgtcttctcatgctccgtgatgcatgaggctctgcacaaccactacacgcagaagagcctctccctgt
ctccgggtaaatgatctaga
Amino acid sequence:
mwqlllptallllvsagmrtedlpkavvflepqwyrvlekdsvtlkcqgayspednstqwfhneslissqassyfidaatvddsg
eyrcqtnlstlsdpvqlevhigwlllqaprwvfkeedpihlrchswkntalhkvtylqngkgrkyfhhnsdfyipkatlkdsgsyf
crglvgsknvssetvnititqgladqepkssdkthtsppssapellggssvflfppkpkdtlmisrtpevtcvvvdvshedpevkf
nwyvdgvevhnaktkpreeqynstyrvvsvltvlhqdwlngkeykckvsnkalpapiektiskakgqprepqvytlppsrdel
tknqvsltclvkgfypsdiavewesngqpennykttppvldsdgsttlyskltvdksrwqqgnvfscsvmhealhnhytqksls
lspgk
101. b.CD16-6 low (ED) + HE4LP + (SSS-S)H P238S CH2 WCH3
Nucleotide sequence:
aagcttgccgccatgcctgcttgtcgcctaggcccgctagccgccgccctcctcctcagcctgctgctgttcggcttcaccctagtctc
aggcaccggtgcaatgcggactgaagatctcccaaaggctgtggtgttcctggagcctcaatggtacagggtgctcgagaaggaca
gtgtgactctgaagtgccagggagcctactcccctgaggacaattccacacagtggtttcacaatgagagcctcatctcaagccagg
cctcgagctacttcattgacgctgccacagtcgacgacagtggagagtacaggtgccagacaaacctctccaccctcagtgacccg
gtgcagctagaagtccatatcggctggctgttgctccaggcccctcggtgggtgttcaaggaggaagaccctattcacctgaggtgtc
acagctggaagaacactgctctgcataaggtcacatatttacagaatggcaaaggcaggaagtattttcatcataattctgacttctacat
tccaaaagccacactcaaagacagcggctcctacttctgcagggggcttgttgggagtaaaaatgtgtcttcagagactgtgaacatc
accatcactcaaggtttggctgatcaggagcccaaatcttctgacaaaactcacacatccccaccgtcctcagcacctgaactcctgg
ggggatcgtcagtcttcctcttccccccaaaacccaaggacaccctcatgatctcccggacccctgaggtcacatgcgtggtggtgg
acgtgagccacgaagaccctgaggtcaagttcaactggtacgtggacggcgtggaggtgcataatgccaagacaaagccgcggg
aggagcagtacaacagcacgtaccgtgtggtcagcgtcctcaccgtcctgcaccaggactggctgaatggcaaggagtacaagtg
caaggtctccaacaaagccctcccagcccccatcgagaaaacaatctccaaagccaaagggcagccccgagaaccacaggtgta
caccctgcccccatcccgggatgagctgaccaagaaccaggtcagcctgacctgcctggtcaaaggcttctatcccagcgacatcg
ccgtggagtgggagagcaatgggcagccggagaacaactacaagaccacgcctcccgtgctggactccgacggctccttcttcct
ctacagcaagctcaccgtggacaagagcaggtggcagcaggggaacgtcttctcatgctccgtgatgcatgaggctctgcacaacc
actacacgcagaagagcctctccctgtctccgggtaaatgatctagaaa
Amino acid sequence:
mpacrlgplaaalllslllfgftlvsgtgamrtedlpkavvflepqwyrvlekdsvtlkcqgayspednstqwthneslissqassy
fidaatvddsgeyrcqtnlstlsdpvqlevhigwlllqaprwvfkeedpihlrchswkntalhkvtylqngkgrkyfhhnsdfyi
pkatlkdsgsyfcrglvgsknvssetvnititqgladqepkssdkthtsppssapellggssvflfppkpkdtlmisrtpevtcvvv
dvshedpevkfnwyvdgvevhnaktkpreeqynstyrvvsvltvlhqdwlngkeykckvsnkalpapiektiskakgqpre
pqvytlppsrdeltknqvsltclvkgfypsdiavewesngqpennykttppvldsdgsttlyskltvdksrwqqgnvfscsvmh
ealhnhytqkslslspgk
102. CD16-9 high (ED) (SSS-S)H P238S CH2 CH3
a. CD16-9 high (ED)NL + (SSS-S)H P238S CH2 CH3
Nucleotide sequence:
gttgttaagcttgccgccatgtggcagctgctcctcccaactgctctgctacttctagtttcagctggcatgcggactgaagatctccca
aaggctgtggtgttcctggagcctcaatggtacagggtgctcgagaaggacagtgtgactctgaagtgccagggagcctactcccct
gaggacaattccacacagtggtttcacaatgagagcctcatctcaagccaggcctcgagctacttcattgacgctgccacagtcgacg
acagtggagagtacaggtgccagacaaacctctccaccctcagtgacccggtgcagctagaagtccatatcggctggctgttgctcc
aggcccctcggtgggtgttcaaggaggaagaccctattcacctgaggtgtcacagctggaagaacactgctctgcataaggtcacat
atttacagaatggcaaaggcaggaagtattttcatcataattctgacttctacattccaaaagccacactcaaagacagcggctcctactt
ctgcagggggctttttgggagtaaaaatgtgtcttcagagactgtgaacatcaccatcactcaaggtttggctgatcaggagcccaaat
cttctgacaaaactcacacatccccaccgtcctcagcacctgaactcctggggggatcgtcagtcttcctcttccccccaaaacccaa
ggacaccctcatgatctcccggacccctgaggtcacatgcgtggtggtggacgtgagccacgaagaccctgaggtcaagttcaact
ggtacgtggacggcgtggaggtgcataatgccaagacaaagccgcgggaggagcagtacaacagcacgtaccgtgtggtcagc
gtcctcaccgtcctgcaccaggactggctgaatggcaaggagtacaagtgcaaggtctccaacaaagccctcccagcccccatcga
gaaaacaatctccaaagccaaagggcagccccgagaaccacaggtgtacaccctgcccccatcccgggatgagctgaccaagaa
ccaggtcagcctgacctgcctggtcaaaggcttctatcccagcgacatcgccgtggagtgggagagcaatgggcagccggagaac
aactacaagaccacgcctcccgtgctggactccgacggctccttcttcctctacagcaagctcaccgtggacaagagcaggtggca
gcaggggaacgtcttctcatgctccgtgatgcatgaggctctgcacaaccactacacgcagaagagcctctccctgtctccgggtaa
atgatctagaaa
Amino acid sequence:
mwqlllptallllvsagmrtedlpkavvflepqwyrvlekdsvtlkcqgayspednstqwfhneslissqassyfidaatvddsg
eyrcqtnlstlsdpvqlevhigwlllqaprwvfkeedpihlrchswkntalhkvtylqngkgrkyfhhnsdfyipkatlkdsgsyf
crglfgsknvssetvnititqgladqepkssdkthtsppssapellggssvflfppkpkdtlmisrtpevtcvvvdvshedpevkfn
wyvdgvevhnaktkpreeqynstyrvvsvltvlhqdwlngkeykckvsnkalpapiektiskakgqprepqvytlppsrdelt
knqvsltclvkgfypsdiavewesngqpennykttppvldsdgsttlyskltvdksrwqqgnvfscsvmhealhnhytqkslsl
spgk
CD16-9 high (ED) + HE4LP + hIgG1 (SSS-S)H P238S CH2 CH3
Nucleotide sequence:
aagcttgccgccatgcctgcttgtcgcctaggcccgctagccgccgccctcctcctcagcctgctgctgttcggcttcaccctagtctc
aggcaccggtgcaatgcggactgaagatctcccaaaggctgtggtgttcctggagcctcaatggtacagggtgctcgagaaggaca
gtgtgactctgaagtgccagggagcctactcccctgaggacaattccacacagtggtttcacaatgagagcctcatctcaagccagg
cctcgagctacttcattgacgctgccacagtcgacgacagtggagagtacaggtgccagacaaacctctccaccctcagtgacccg
gtgcagctagaagtccatatcggctggctgttgctccaggcccctcggtgggtgttcaaggaggaagaccctattcacctgaggtgtc
acagctggaagaacactgctctgcataaggtcacatatttacagaatggcaaaggcaggaagtattttcatcataattctgacttctacat
tccaaaagccacactcaaagacagcggctcctacttctgcagggggctttttgggagtaaaaatgtgtcttcagagactgtgaacatca
ccatcactcaaggtttggctgatcaggagcccaaatcttctgacaaaactcacacatccccaccgtcctcagcacctgaactcctggg
gggatcgtcagtcttcctcttccccccaaaacccaaggacaccctcatgatctcccggacccctgaggtcacatgcgtggtggtgga
cgtgagccacgaagaccctgaggtcaagttcaactggtacgtggacggcgtggaggtgcataatgccaagacaaagccgcggga
ggagcagtacaacagcacgtaccgtgtggtcagcgtcctcaccgtcctgcaccaggactggctgaatggcaaggagtacaagtgc
aaggtctccaacaaagccctcccagcccccatcgagaaaacaatctccaaagccaaagggcagccccgagaaccacaggtgtac
accctgcccccatcccgggatgagctgaccaagaaccaggtcagcctgacctgcctggtcaaaggcttctatcccagcgacatcgc
cgtggagtgggagagcaatgggcagccggagaacaactacaagaccacgcctcccgtgctggactccgacggctccttcttcctct
acagcaagctcaccgtggacaagagcaggtggcagcaggggaacgtcttctcatgctccgtgatgcatgaggctctgcacaacca
ctacacgcagaagagcctctccctgtctccgggtaaatgatctagaaa
Amino acid sequence:
mpacrlgplaaalllslllfgftlvsgtgamrtedlpkavvflepqwyrvlekdsvtlkcqgayspednstqwfhneslissqassy
fidaatvddsgeyrcqtnlstlsdpvqlevhigwlllqaprwvfkeedpihlrchswkntalhkvtylqngkgrkyfhhnsdfyi
pkatlkdsgsyfcrglfgsknvssetvnititqgladqepkssdkthtsppssapellggssvtlfppkpkdtlmisrtpevtcvvvd
vshedpevkfnwyvdgvevhnaktkpreeqynstyrvvsvltvlhqdwlngkeykckvsnkalpapiektiskakgqprep
qvytlppsrdeltknqvsltclvkgfypsdiavewesngqpennykttppvldsdgsttlyskltvdksrwqqgnvfscsvmhe
alhnhytqkslslspgk
103. a. CD16 ED low (native leader)
Nucleotide sequence:
aagcttgccgccatgtggcagctgctcctcccaactgctctgctacttctagtttcagctggcatgcggactgaagatctcccaaaggc
tgtggtgttcctggagcctcaatggtacagggtgctcgagaaggacagtgtgactctgaagtgccagggagcctactcccctgagga
caattccacacagtggtttcacaatgagagcctcatctcaagccaggcctcgagctacttcattgacgctgccacagtcgacgacagt
ggagagtacaggtgccagacaaacctctccaccctcagtgacccggtgcagctagaagtccatatcggctggctgttgctccaggc
ccctcggtgggtgttcaaggaggaagaccctattcacctgaggtgtcacagctggaagaacactgctctgcataaggtcacatattta
cagaatggcaaaggcaggaagtattttcatcataattctgacttctacattccaaaagccacactcaaagacagcggctcctacttctgc
agggggcttgttgggagtaaaaatgtgtcttcagagactgtgaacatcaccatcactcaaggtttggctgatcaaaa
Amino acid sequence:
mwqlllptallllvsagmrtedlpkavvflepqwyrvlekdsvtlkcqgayspednstqwfhneslissqassyfidaatvddsg
eyrcqtnlstlsdpvqlevhigwlllqaprwvfkeedpihlrchswkntalhkvtylqngkgrkyfhhnsdfyipkatlkdsgsyf
crglvgsknvssetvnititqgladq
b. CD16 ED low (HE4 leader)
Nucleotide sequence
aagcttgccgccatgcctgcttgtcgcctaggcccgctagccgccgccctcctcctcagcctgctgctgttcggcttcaccctagtctc
aggcaccggtgcaatgcggactgaagatctcccaaaggctgtggtgttcctggagcctcaatggtacagggtgctcgagaaggaca
gtgtgactctgaagtgccagggagcctactcccctgaggacaattccacacagtggtttcacaatgagagcctcatctcaagccagg
cctcgagctacttcattgacgctgccacagtcgacgacagtggagagtacaggtgccagacaaacctctccaccctcagtgacccg
gtgcagctagaagtccatatcggctggctgttgctccaggcccctcggtgggtgttcaaggaggaagaccctattcacctgaggtgtc
acagctggaagaacactgctctgcataaggtcacatatttacagaatggcaaaggcaggaagtattttcatcataattctgacttctacat
tccaaaagccacactcaaagacagcggctcctacttctgcagggggcttgttgggagtaaaaatgtgtcttcagagactgtgaacatc
accatcactcaaggtttggctgatcaaa
Amino acid sequence
mpacrlgplaaalllslllfgftlvsgtgamrtedlpkavvflepqwyrvlekdsvtlkcqgayspednstqwfhneslissqassy
fidaatvddsgeyrcqtnlstlsdpvqlevhigwlllqaprwvfkeedpihlrchswkntalhkvtylqngkgrkyfhhnsdfyi
pkatlkdsgsyfcrglvgsknvssetvnititqgladq
104. a. CD16 ED high (native leader)
Nucleotide sequence:
gttgttaagcttgccgccatgtggcagctgctcctcccaactgctctgctacttctagtttcagctggcatgcggactgaagatctccca
aaggctgtggtgttcctggagcctcaatggtacagggtgctcgagaaggacagtgtgactctgaagtgccagggagcctactcccct
gaggacaattccacacagtggtttcacaatgagagcctcatctcaagccaggcctcgagctacttcattgacgctgccacagtcgacg
acagtggagagtacaggtgccagacaaacctctccaccctcagtgacccggtgcagctagaagtccatatcggctggctgttgctcc
aggcccctcggtgggtgttcaaggaggaagaccctattcacctgaggtgtcacagctggaagaacactgctctgcataaggtcacat
atttacagaatggcaaaggcaggaagtattttcatcataattctgacttctacattccaaaagccacactcaaagacagcggctcctactt
ctgcagggggctttttgggagtaaaaatgtgtcttcagagactgtgaacatcaccatcactcaaggtttggctgatcaaa
Amino acid sequence:
mwqlllptallllvsagmrtedlpkavvflepqwyrvlekdsvtlkcqgayspednstqwfhneslissqassyfidaatvddsg
eyrcqtnlstlsdpvqlevhigwlllqaprwvfkeedpihlrchswkntalhkvtylqngkgrkyfhhnsdfyipkatlkdsgsyf
crglfgsknvssetvnititqgladq
b. CD16 ED high (HE4 leader)
Nucleotide sequence:
aagcttgccgccatgcctgcttgtcgcctaggcccgctagccgccgccctcctcctcagcctgctgctgttcggcttcaccctagtctc
aggcaccggtgcaatgcggactgaagatctcccaaaggctgtggtgttcctggagcctcaatggtacagggtgctcgagaaggaca
gtgtgactctgaagtgccagggagcctactcccctgaggacaattccacacagtggtttcacaatgagagcctcatctcaagccagg
cctcgagctacttcattgacgctgccacagtcgacgacagtggagagtacaggtgccagacaaacctctccaccctcagtgacccg
gtgcagctagaagtccatatcggctggctgttgctccaggcccctcggtgggtgttcaaggaggaagaccctattcacctgaggtgtc
acagctggaagaacactgctctgcataaggtcacatatttacagaatggcaaaggcaggaagtattttcatcataattctgacttctacat
tccaaaagccacactcaaagacagcggctcctacttctgcagggggctttttgggagtaaaaatgtgtcttcagagactgtgaacatca
ccatcactcaaggtttggctgatcaaa
Amino acid sequence:
mpacrlgplaaalllslllfgftlvsgtgamrtedlpkavvflepqwyrvlekdsvtlkcqgayspednstqwfhneslissqassy
fidaatvddsgeyrcqtnlstlsdpvqlevhigwlllqaprwvfkeedpihlrchswkntalhkvtylqngkgrkyfhhnsdfyi
pkatlkdsgsyfcrglfgsknvssetvnititqgladq
105. 2e12 scFv (SSS-S)H P238S CH2 WCH3-hCD80TM/CT
Nucleotide sequence:
aagcttatggattttcaagtgcagattttcagcttcctgctaatcagtgcttcagtcataatgtccagaggagtcgacattgtgctcaccca
atctccagcttctttggctgtgtctctaggtcagagagccaccatctcctgcagagccagtgaaagtgttgaatattatgtcacaagttta
atgcagtggtaccaacagaaaccaggacagccacccaaactcctcatctctgctgcatccaacgtagaatctggggtccctgccagg
tttagtggcagtgggtctgggacagacttcagcctcaacatccatcctgtggaggaggatgatattgcaatgtatttctgtcagcaaagt
aggaaggttccttggacgttcggtggaggcaccaagctggaaatcaaacggggtggcggtggctcgggcggaggtgggtcgggt
ggcggcggatctcaggtgcagctgaaggagtcaggacctggcctggtggcgccctcacagagcctgtccatcacatgcaccgtct
cagggttctcattaaccggctatgtgtaaactgggttcgccagcctccaggaaagggtctggagtggctgggaatgatatggggtg
atggaagcacagactataattcagctctcaaatccagactgagcatcaccaaggacaactccaagagccaagttttcttaaaaatgaa
cagtctgcaaactgatgacacagccagatactactgtgccagagatggttatagtaactttcattactatgttatggactactggggtcaa
ggaacctcagtcaccgtctcctcagatctggagcccaaatcttctgacaaaactcacacatccccaccgtccccagcacctgaactcc
tggggggatcgtcagtcttcctcttccccccaaaacccaaggacaccctcatgatctcccggacccctgaggtcacatgcgtggtggt
ggacgtgagccacgaagaccctgaggtcaagttcaactggtacgtggacggcgtggaggtgcataatgccaagacaaagccgcg
ggaggagcagtacaacagcacgtaccgtgtggtcagcgtcctcaccgtcctgcaccaggactggctgaatggcaaggagtacaag
tgcaaggtctccaacaaagccctcccagcccccatcgagaaaaccatctccaaagccaaagggcagccccgagaaccacaggtgt
acaccctgcccccatcccgggatgagctgaccaagaaccaggtcagcctgacctgcctggtcaaaggcttctatcccagcgacatc
gccgtggagtgggagagcaatgggcagccggagaacaactacaagaccacgcctcccgtgctggactccgacggctccttcttcc
tctacagcaagctcaccgtggacaagagcaggtggcagcaggggaacgtcttctcatgctccgtgatgcatgaggctctgcacaac
cactacacgcagaagagcctctccctgtctccgggtaaagcggatccttcgaacctgetcccatcctgggccattaccttaatctcagt
aaatggaatttttgtgatatgctgcctgacctactgctttgccccaagatgcagagagagaaggaggaatgagagattgagaaggga
aagtgtacgccctgtataaatcgat
Amino acid sequence:
mdfqvqifsfllisasvimsrgvdivltqspaslavslgqratiscrasesveyyvtslmqwyqqkpgqppkllisaasnvesgvp
arfsgsgsgtdfslnihpveeddiamyfcqqsrkvpwtfgggtkleikrggggsggggsggggsqvqlkesgpglvapsqslsit
ctvsgfsltgygvnwvrqppgkglewlgmiwgdgstdynsalksrlsitkdnsksqvflkmnslqtddtaryycardgysnth
yyvmdywgqgtsvtvssdlepkssdkthtsppspapellggssvflfppkpkdtlmisrtpevtcvvvdvshedpevkfnwy
vdgvevhnaktkpreeqynstyrvvsvltvlhqdwlngkeykckvsnkalpapiektiskakgciprepqvytlppsrdeltkn
qvsltclvkgfypsdiavewesngcqpennykttppvldsdgsttlyskltvdksrwqqgnvfscsvmhealhnhytqkslslsp
gkadpsnllpswaitlisvngifviccltycfaprcrerrrnerlrresvrpv
106. 10A8 scFv (SSS-S)H P238SCH2 WCH3-hCD80TM/CT
Nucleotide sequence:
aagcttatggattttcaagtgcagattttcagcttcctgctaatcagtgcttcagtcataatgtccagaggagtcgacatccagatgacac
agtctccatcctcactgtctgcatctctgggaggcaaagtcaccatcacttgcaaggcaagccaagacattaagaagtatataggttgg
taccaacacaagcctggaaaaggtcccaggctgctcatatattacacatctacattacagccaggcatcccatcaaggttcagtggaa
gtgggtctgggagagattattccctcagcatcagaaacctggagcctgaagatattgcaacttattattgtcaacagtatgataatcttcc
attgacgttcggctcggggacaaagttggaaataaaacggggtggcggtggctcgggcggtggtgggtcgggtggcggcggatct
gatgtacagcttcaggagtcaggacctggcctcgtgaaaccttctcagtctctgtctctcacctgctctgtcactggctactccatcacc
agtggtttctactggaactggatccgacagtttccgggaaacaaactggaatggatgggccacataagccacgacggtaggaataac
tacaacccatctctcataaatcgaatctccatcactcgtgacacatctaagaaccagtttttcctgaagttgagttctgtgactactgagga
cacagctacatatttctgtgcaagacactacggtagtagcggagctatggactactggggtcaaggaacctcagtcaccgtctcctct
gatctggagcccaaatcttctgacaaaactcacacatccccaccgtccccagcacctgaactcctggggggatcgtcagtcttcctctt
ccccccaaaacccaaggacaccctcatgatctcccggacccctgaggcacatgcgtggtggtggacgtgagccacgaagaccct
gaggtcaagttcaactggtacgtggacggcgtggaggtgcataatgccaagacaaagccgcgggaggagcagtacaacagcacg
taccgtgtggtcagcgtcctcaccgtcctgcaccaggactggctgaatggcaaggagtacaagtgcaaggtctccaacaaagccct
cccagcccccatcgagaaaaccatctccaaagccaaagggcagccccgagaaccacaggtgtacaccctgcccccatcccggga
tgagctgaccaagaaccaggtcagcctgacctgcctggtcaaaggcttctatcccagcgacatcgccgtggagtgggagagcaatg
ggcagccggagaacaactacaagaccacgcctcccgtgctggactccgacggctccttcttcctctacagcaagctcaccgtggac
aagagcaggtggcagcaggggaacgtcttctcatgctccgtgatgcatgaggctctgcacaaccactacacgcagaagagcctctc
cctgtctccgggtaaagcggatccttcgaacctgctcccatcctgggccattaccttaatctcagtaaatggaatttttgtgatatgctgc
ctgacctactgctttgccccaagatgcagagagagaaggaggaatgagagattgagaagggaaagtgtacgccctgtataaatcga
t
Amino acid sequence:
mdfqvqifsflhisasvimsrgvdiqmtqspsslsaslggkvtitckasqdikkyigwyqhkpgkgprlliyytstkipgipsrfsg
sgsgrdyslsirnlepediatyycqqydnlpltfgsgtkleikrggggsggggsggggsdvqlqesgpglvkpsqslsltcsvtgys
itsgfywnwirqfpgriklewmghishdgrnnynpslinrisitrdtsknqttlklssvttedtatyfcarhygssgamdywgqgt
svtvssdlepkssdkthtsppspapellggssvflfppkpkdtlmisrtpevtcvvvdvshedpevkfnwyvdgvevhnaktk
preeqynstyrvvsvltvlhqdwlngkeykckvsnkalpapiektiskakgqprepqvytlppsrdeltknqvsltclvkgfyps
diavewesngqpennykttppvldsdgsttlyskltvdksrwqqgnvfscsvmhealhnhytqkslslspgkadpsnhlpswa
itlisvngifviccltycfaprcrerrrnerlrresvrpv
107. 40.2.36 scFv (SSS-P)H P238SCH2 WCH3-hCD80TM/CT
Nucleotide sequence:
Amino acid sequence:
108. 2H7 scFv VHL11S (SSS-P)H P238SCH2CH3-hCD80TM/CT
Nucleotide sequence:
aagcttgccgccatggattttcaagtgcagattttcagcttcctgctaatcagtgcttcagtcataattgccagaggacaaattgttctctc
ccagtctccagcaatcctgtctgcatctccaggggagaaggtcacaatgacttgcagggccagctcaagtgtaagttacatgcactgg
taccagcagaagccaggatcctcccccaaaccctggatttatgccccatccaacctggcttctggagtccctgctcgcttcagtggca
gtgggtctgggacctcttactctctcacaatcagcagagtggaggctgaagatgctgccacttattactgccagcagtggagttttaac
ccacccacgttcggtgctgggaccaagctggagctgaaagatggcggtggctcgggcggtggtggatctggaggaggtgggagc
tctcaggcttatctacagcagtctggggctgagtcggtgaggcctggggcctcagtgaagatgtcctgcaaggcttctggctacacat
ttaccagttacaatatgcactgggtaaagcagacacctagacagggcctggaatggattggagctatttatccaggaaatggtgatact
tcctacaatcagaagttcaagggcaaggccacactgactgtagacaaatcctccagcacagcctacatgcagctcagcagcctgac
atctgaagactctgcggtctatttctgtgcaagagtggtgtactatagtaactcttactggtacttcgatgtctggggcacagggaccac
ggtcaccgtctcttctgatctggagcccaaatcttctgacaaaactcacacatccccaccgtccccagcacctgaactcctgggggga
tcgtcagtcttcctcttccccccaaaacccaaggacaccctcatgatctcccggacccctgaggtcacatgcgtggtggtggacgtga
gccacgaagaccctgaggtcaagttcaactggtacgtggacggcgtggaggtgcataatgccaagacaaagccgcgggaggagc
agtacaacagcacgtaccgtgtggtcagcgtcctcaccgtcctgcaccaggactggctgaatggcaaggagtacaagtgcaaggtc
tccaacaaagccctcccagcccccatcgagaaaaccatctccaaagccaaagggcagccccgagaaccacaggtgtacaccctg
cccccatcccgggatgagctgaccaagaaccaggtcagcctgacctgcctggtcaaaggcttctatcccagcgacatcgccgtgga
gtgggagagcaatgggcagccggagaacaactacaagaccacgcctcccgtgctggactccgacggctccttcttcctctacagca
agctcaccgtggacaagagcaggtggcagcaggggaacgtcttctcatgctccgtgatgcatgaggctctgcacaaccactacacg
cagaagagcctctccctgtctccgggtaaagcggatccttcgaacctgctcccatcctgggccattaccttaatctcagtaaatggaatt
tttgtgatatgctgcctgacctactgctttgccccaagatgcagagagagaaggaggaatgagagattgagaagggaaagtgtacgc
cctgtataaatcgat
Amino acid sequence:
mdfqvqifsflhisasviiargqivlsqspailsaspgekvtmtcrasssvsymhwyqqkpgsspkpwiyapsnlasgvparfsg
sgsgtsysltisrveaedaatyycqqwsfnpptfgagtklelkdgggsggggsggggssqaylqqsgaesvrpgasvkmsckas
gytftsynmhwvkqtprqglewigaiypgngdtsynqkfkgkatltvdkssstaymqlssltsedsavyfcarvvyysnsywy
fdvwgtgttvtvssdlepkssdkthtsppspapellggssvflfppkpkdflmisrtpevtcvvvdvshedpevkfnwyvdgve
vhnaktkpreeqynstyrvvsvltvlhqdwlngkeykckvsnkalpapiektiskakgqprepqvytlppsrdeltknqvsltcl
vkgfypsdiavewesngqpennykttppvldsdgsttlyskltvdksrwqqgnvfscsvmhealhnhytqkslslspgkadps
nllpswaitlisvngifviccltycfaprcrerrrnerlrresvrpv
109. G19-4 scFv (SSS-P)H P238SCH2 WCH3-hCD80TM/CT
Nucleotide sequence:
aagcttatggattttcaagtgcagattttcagcttcctgctaatcagtgcttcagtcataatgtccagaggagtcgacatccagatgacac
agactacatcctccctgtctgcctctctgggagacagagtcaccatcagttgcagggcaagtcaggacattcgcaattatttaaactgg

[0860] tatcagcagaaaccagatggaactgttaaactcctgatctactacacatcaagattacactcaggagtcccatcaaggttcagtggcag
tgggtctggaacagattattctctcaccattgccaacctgcaaccagaagatattgccacttacttttgccaacagggtaatacgcttccg
tggacgttcggtggaggcaccaaactggtaaccaaacgggagctcggtggcggtggctcgggcggtggtgggtcgggtggcgg
cggatctatcgatgaggtccagctgcaacagtctggacctgaactggtgaagcctggagcttcaatgtcctgcaaggcctctggttac
tcattcactggctacatcgtgaactggctgaagcagagccatggaaagaaccttgagtggattggacttattaatccatacaaaggtctt
actacctacaaccagaaattcaagggcaaggccacattaactgtagacaagtcatccagcacagcctacatggagctcctcagtctg
acatctgaagactctgcagtctattactgtgcaagatctgggtactatggtgactcggactggtacttcgatgtctggggcgcagggac
cacggtcaccgtctcctctgatctggagcccaaatcttctgacaaaactcacacaagcccaccgagcccagcacctgaactcctggg
gggatcgtcagtcttcctcttccccccaaaacccaaggacaccctcatgatctcccggacccctgaggtcacatgcgtggtggtgga
cgtgagccacgaagaccctgaggtcaagttcaactggtacgtggacggcgtggaggtgcataatgccaagacaaagccgcggga
ggagcagtacaacagcacgtaccgtgtggtcagcgtcctcaccgtcctgcaccaggactggctgaatggcaaggagtacaagtgc
aaggtctccaacaaagccctcccagcccccatcgagaaaaccatctccaaagccaaagggcagccccgagaaccacaggtgtac
accctgcccccatcccgggatgagctgaccaagaaccaggtcagcctgacctgcctggtcaaaggcttctatcccagcgacatcgc
cgtggagtgggagagcaatgggcagccggagaacaactacaagaccacgcctcccgtgctggactccgacggctccttcttcctct
acagcaagctcaccgtggacaagagcaggtggcagcaggggaacgtcttctcatgctccgtgatgcatgaggctctgcacaacca
ctacacgcagaagagcctctccctgtctccgggtaaagcggatccttcgaacctgctcccatcctgggccattaccttaatctcagtaa
atggaatttttgtgatatgctgcctgacctactgctttgccccaagatgcagagagagaaggaggaatgagagattgagaagggaaa
gtgtacgccctgtataaatcgatactcgag
Amino acid sequence:
mdfqvqifsfllisasvimsrgvdiqmtqttsslsaslgdrvtiscrasqdirnylnwyqqkpdgtvklliyytsrlhsgvpsrfsgs
gsgtdysltianlqpediatyfcqqgntlpwtfgggtklvtkrelggggsggggsggggsidevqlqqsgpelvkpgasmsckas
gysftgyivnwlkqshgknlewiglinpykglttynqkflgkatltvdkssstaymellsltsedsavyycarsgyygdsdwyf
dvwgagttvtvssdlepkssdkthtsppspapellggssvflfppkpkdtlmisrtpevtcvvvdvshedpevkfnwyvdgve
vhnaktkpreeqynstyrvvsvltvlhqdwlngkeykckvsnkalpapiektiskakgqprepqvytlppsrdeltknqvsltcl
vkgfypsdiavewesngqpennykttppvldsdgsfflyskltvdksrwqqgnvfscsvmhealhnhytqkslslspgkadps
nllpswaitlisvngifviccltycfaprcrerrrnerlrresvrpv
110. 2e12 scFv (SSS-P)H WCH2 WCH3-hCD80TM/CT
Nucleotide sequence:
aagcttatggattttcaagtgcagattttcagcttcctgctaatcagtgcttcagtcataatgtccagaggagtcgacattgtgctcaccca
atctccagcttctttggctgtgtctctaggtcagagagccaccatctcctgcagagccagtgaaagtgttgaatattatgtcacaagttta
atgcagtggtaccaacagaaaccaggacagccacccaaactcctcatctctgctgcatccaacgtagaatctggggtccctgccagg
tttagtggcagtgggtctgggacagacttcagcctcaacatccatcctgtggaggaggatgatattgcaatgtatttctgtcagcaaagt
aggaaggttccttggacgttcggtggaggcaccaagctggaaatcaaacggggtggcggtggctcgggcggaggtgggtcgggt
ggcggcggatctcaggtgcagctgaaggagtcaggacctggcctggtggcgccctcacagagcctgtccatcacatgcaccgtct
cagggttctcattaaccggctatggtgtaaactgggttcgccagcctccaggaaagggtctggagtggctgggaatgatatggggtg
atggaagcacagactataattcagctctcaaatccagactgagcatcaccaaggacaactccaagagccaagttttcttaaaaatgaa
cagtctgcaaactgatgacacagccagatactactgtgccagagatggttatagtaactttcattactatgttatggactactggggtcaa
ggaacctcagtcaccgtctcctcagatctggagcccaaatcttctgacaaaactcacacatccccaccgtccccagcacctgaactcc
tggggggaccgtcagtcttcctcttccccccaaaacccaaggacaccctcatgatctcccggacccctgaggtcacatgcgtggtgg
tggacgtgagccacgaagaccctgaggtcaagttcaactggtacgtggacggcgtggaggtgcataatgccaagacaaagccgcg
ggaggagcagtacaacagcacgtaccgtgtggtcagcgtcctcaccgtcctgcaccaggactggctgaatggcaaggagtacaag
tgcaaggtctccaacaaagccctcccagcccccatcgagaaaaccatctccaaagccaaagggcagccccgagaaccacaggtgt
acaccctgcccccatcccgggatgagctgaccaagaaccaggtcagcctgacctgcctggtcaaaggcttctatcccagcgacatc
gccgtggagtgggagagcaatgggcagccggagaacaactacaagaccacgcctcccgtgctggactccgacggctccttcttcc
tctacagcaagctcaccgtggacaagagcaggtggcagcaggggaacgtcttctcatgctccgtgatgcatgaggctctgcacaac
cactacacgcagaagagcctctccctgtctccgggtaaagcggatccttcgaacctgctcccatcctgggccattaccttaatctcagt
aaatggaatttttgtgatatgctgcctgacctactgctttgccccaagatgcagagagagaaggaggaatgagagattgagaaggga
aagtgtacgccctgtataaatcgat
Amino acid sequence
mdfqvqifsfllisasvimsrgvdivltqspaslavslgqratiscrasesveyyvtslmqwyqqkpgqppkllisaasnvesgvp
arfsgsgsgtdfslnihpveeddiamyfcqqsrkvpwtfgggtkleikrggggsggggsggggsqvqlkesgpglvapsqslsit
ctvsgfsltgygvnwvrqppgkglewlgmiwgdgstdynsalksrlsitkdnsksqvflkmnslqtddtaryycardgysnfh
yyvmdywgqgtsvtvssdlepkssdkthtsppspapellggpsvflfppkpkdtlmisrtpevtcvvvdvshedpevkfnwy
vdgvevhnaktkpreeqynstyrvvsvltvlhqdwlngkeykckvsnkalpapiektiskakgqprepqvytlppsrdeltkn
qvsltclvkgfypsdiavewesngqpennykttppvldsdgsfflyskltvdksrwqqgnvfscsvmhealhnhytqkslslsp
gkadpsnllpswaitlisvngifviccltycfaprcrerrrnerlrresvrpv
111. 2e12 scFv IgA WH WCH2 T4 CH3-hCD80TM/CT
Nucleotide sequence:
aagcttatggattttcaagtgcagattttcagcttcctgctaatcagtgcttcagtcataatgtccagaggagtcgacattgtgctcaccca
atctccagcttctttggctgtgtctctaggtcagagagccaccatctcctgcagagccagtgaaagtgttgaatattatgtcacaagttta
atgcagtggtaccaacagaaaccaggacagccacccaaactcctcatctctgctgcatccaacgtagaatctggggtccctgccagg
tttagtggcagtgggtctgggacagacttcagcctcaacatccatcctgtggaggaggatgatattgcaatgtatttctgtcagcaaagt
aggaaggttccttggacgttcggtggaggcaccaagctggaaatcaaacggggtggcggtggctcgggcggaggtgggtcgggt
ggcggcggatctcaggtgcagctgaaggagtcaggacctggcctggtggcgccctcacagagcctgtccatcacatgcaccgtct
cagggttctcattaaccggctatggtgtaaactgggttcgccagcctccaggaaagggtctggagtggctgggaatgatatggggtg
atggaagcacagactataattcagctctcaaatccagactgagcatcaccaaggacaactccaagagccaagttttcttaaaaatgaa
cagtctgcaaactgatgacacagccagatactactgtgccagagatggttatagtaactttcattactatgttatggactactggggtcaa
ggaacctcagtcaccgtctcctcagatcagccagttccctcaactccacctaccccatctccctcaactccacctaccccatctccctca
tgctgccacccccgactgtcactgcaccgaccggccctcgaggacctgctcttaggttcagaagcgatcctcacgtgcacactgacc
ggcctgagagatgcctcaggtgtcaccttcacctggacgccctcaagtgggaagagcgctgttcaaggaccacctgaccgtgacct
ctgtggctgctacagcgtgtccagtgtcctgccgggctgtgccgagccatggaaccatgggaagaccttcacttgcactgctgcctac
cccgagtccaagaccccgctaaccgccaccctctcaaaatccggaaacacattccggcccgaggtccacctgctgccgccgccgt
cggaggagctggccctgaacgagctggtgacgctgacgtgcctggcacgtggcttcagccccaaggatgtgctggttcgctggct
gcaggggtcacaggagctgccccgcgagaagtacctgacttgggcatcccggcaggagcccagccagggcaccaccaccttcg
ctgtgaccagcatactgcgcgtggcagccgaggactggaagaagggggacaccttctcctgcatggtgggccacgaggccctgc
cgctggccttcacacagaagaccatcgaccgcttggcgggtaaacccacccatgtcaatgtgtctgttgtcatggcggaggtggacg
cggatccttcgaacaacctgctcccatcctgggccattaccttaatctcagtaaatggaatttttgtgatatgctgcctgacctactgcttt
gccccaagatgcagagagagaaggaggaatgagagattgagaagggaaagtgtacgccctgtataaatcgatac
Amino acid sequence:
mdfqvqifsfllisasvimsrgvdivltqspaslavslgqratiscrasesveyyvtslmqwyqqkpgqppkllisaasnvesgvp
arfsgsgsgtdfslnihpveeddiamyfcqqsrkvpwtfgggtkleikrggggsggggsggggsqvqlkesgpglvapsqslsit
ctvsgfsltgygvnwvrqppgkglewlgmiwgdgstdynsalksrlsitkdnsksqvflkmnslqtddtaryycardgysnfh
yyvmdywgqgtsvtvssdqpvpstpptpspstpptpspscchprlslhrpaledlllgseailtctltglrdasgvtftwtpssgksa
vqgppdrdlcgcysvssvlpgcaepwnhgktftctaaypesktpltatlsksgntfrpevhllpppseelalnelvtltclargfspk
dvlvrwlqgsqelprekyltwasrqepsqgtttfavtsilrvaaedwkkgdtfscmvghealplaftqktidrlagkpthvnvsvv
maevdadpsnnllpswaitlisvngifviccltycfaprcrerrrnerlrresvrpv
112. 2e12scFv IgE WCH2WCH3WCH4-hCD80TM/CT
Nucleotide sequence:
aagcttatggattttcaagtgcagattttcagcttcctgctaatcagtgcttcagtcataatgtccagaggagtcgacattgtgctcaccca
atctccagcttctttggctgtgtctctaggtcagagagccaccatctcctgcagagccagtgaaagtgttgaatattatgtcacaagttta
atgcagtggtaccaacagaaaccaggacagccacccaaactcctcatctctgctgcatccaacgtagaatctggggtccctgccagg
tttagtggcagtgggtctgggacagacttcagcctcaacatccatcctgtggaggaggatgatattgcaatgtatttctgtcagcaaagt
aggaaggttccttggacgttcggtggaggcaccaagctggaaatcaaacggggtggcggtggctcgggcggaggtgggtcgggt
ggcggcggatctcaggtgcagctgaaggagtcaggacctggcctggtggcgccctcacagagcctgtccatcacatgcaccgtct
cagggttctcattaaccggctatggtgtaaactgggttcgccagcctccaggaaagggtctggagtggctgggaatgatatggggtg
atggaagcacagactataattcagctctcaaatccagactgagcatcaccaaggacaactccaagagccaagttttcttaaaaatgaa
cagtctgcaaactgatgacacagccagatactactgtgccagagatggttatagtaactttcattactatgttatggactactggggtcaa
ggaacctcagtcaccgtctcctcagatcacgtctgctccagggacttcaccccgcccaccgtgaagatcttacagtcgtcctgcgacg
gcggcgggcacttccccccgaccatccagctcctgtgcctcgtctctgggtacaccccagggactatcaacatcacctggctggag
gacgggcaggtcatggacgtggacttgtccaccgcctctaccacgcaggagggtgagctggcctccacacaaagcgagctcaccc
tcagccagaagcactggctgtcagaccgcacctacacctgccaggtcacctatcaaggtcacacctttgaggacagcaccaagaag
tgtgcagattccaacccgagaggggtgagcgcctacctaagccggcccagcccgttcgacctgttcatccgcaagtcgcccacgat
cacctgtctggtggtggacctggcacccagcaaggggaccgtgaacctgacctggtcccgggccagtgggaagcctgtgaaccac
tccaccagaaaggaggagaagcagcgcaatggcacgttaaccgtcacgtccaccctgccggtgggcacccgagactggatcgag
ggggagacctaccagtgcagggtgacccacccccacctgcccagggccctcatgcggtccacgaccaagaccagcggcccgcg
tgctgccccggaagtctatgcgtttgcgacgccggagtggccggggagccgggacaagcgcaccctcgcctgcctgatccagaac
ttcatgcctgaggacatctcggtgcagtggctgcacaacgaggtgcagctcccggacgcccggcacagcacgacgcagccccgc
aagaccaagggctccggcttcttcgtcttcagccgcctggaggtgaccagggccgaatgggagcagaaagatgagttcatctgccg
tgcagtccatgaggcagcgagcccctcacagaccgtccagcgagcggtgtctgtaaatcccggtaaagcggatccttcgaagctcc
catcctgggccattaccttaatctcagtaaatggaatttttgtgatatgctgcctgacctactgctttgccccaagatgcagagagagaag
gaggaatgagagattgagaagggaaagtgtacgccctgtataaatcgata
Amino acid sequence:
mdfqvqifsfllisasvimsrgvdivltqspaslavslgqratiscrasesveyyvtslmqwyqqkpgcippkllisaasnvesgvp
arfsgsgsgtdfslnihpveeddiamyfcqqsrkvpwtfgggtkleikrggggsggggsggggsqvqlkesgpglvapsqslsit
ctvsgfsltgygvnwvrqppgkglewlgmiwgdgstdynsalksrlsitkdnsksqvflkmnslqtddtaryycardgysnfh
yyvmdywgqgtsvtvssdhvcsrdftpptvkilqsscdggghfpptiqllclvsgytpgtinitwledgqvmdvdlstasttqeg
elastqseltlsqkhwlsdrtytcqvtyqghtfedstkkcadsnprgvsaylsrpspfdlfirksptitclvvdlapskgtvnltwsras
gkpvnhstrkeekqrngtltvtstlpvgtrdwiegetyqcrvthphlpralmrsttktsgpraapevyafatpewpgsrdkrtlacli
qnfmpedisvqwlhnevqlpdarhsttqprktkgsgffvfsrlevtraeweqkdeficravheaaspsqtvqravsvnpgkadp
sklpswaitlisvngifviccltycfaprcrerrrnerlrresvrpv
113. mFADD-TM/CT
MFADD scscFv
Nucleotide sequence:
gttgtggatccttcgaacatggacccattcctggtgctgctgcactcgctgtccggcagcctgtcgggcaacgatctgatggagctca
agttcttgtgccgcgagcgcgtgagcaaacgaaagctggagcgcgtgcagagtggcctggacctgttcacggtgctgctggagca
gaacgacctggagcgcgggcacaccgggctgctgcgcgagttgctggcctcgctgcgccgacacgatctactgcagcgcctgga
cgacttcgaggcggggacggcgaccgctgcgcccccgggggaggcagatctgcaggtggcatttgacattgtgtgtgacaatgtg
gggagagactggaaaagactggcccgcgagctgaaggtgtctgaggccaagatggatgggattgaggagaagtacccccgaagt
ctgagtgagcgggtaagggagagtctgaaagtctggaagaatgctgagaagaagaacgcctcggtggccggactggtcaaggcg
ctgcggacctgcaggctgaatctggtggctgacctggtggaagaagcccaggaatctgtgagcaagagtgagaatatgtccccagt
actaagggattcaactgtgtcttcctcagaaacaccctgactcgagatcgat
Amino acid sequence:
Vvdpsnmdpflvllhslsgslsgndlmelkflcrervskrklervqsgldlftvlleqndlerghtgllrellaslrrhdllqrlddfea
gtataappgeadlqvafdivcdnvgrdwkrlarelkvseakmdgieekyprslservreslkvwknaekknasvaglvkalrtc
rlnlvadlveeaqesvsksenmspvlrdstvsssetp
114. 2e12 scFV (SSS-P)H P238S CH2 WCH3-mFADD-TM/CT
Nucleotide sequence:
aagcttatggattttcaagtgcagattttcagcttcctgctaatcagtgcttcagtcataatgtccagaggagtcgacattgtgctcaccca
atctccagcttctttggctgtgtctctaggtcagagagccaccatctcctgcagagccagtgaaagtgttgaatattatgtcacaagttta
atgcagtggtaccaacagaaaccaggacagccacccaaactcctcatctctgctgcatccaacgtagaatctggggtccctgccagg
tttagtggcagtgggtctgggacagacttcagcctcaacatccatcctgtggaggaggatgatattgcaatgtatttctgtcagcaaagt
aggaaggttccttggacgttcggtggaggcaccaagctggaaatcaaacggggtggcggtggctcgggcggaggtgggtcgggt
ggcggcggatctcaggtgcagctgaaggagtcaggacctggcctggtggcgccctcacagagcctgtccatcacatgcaccgtct
cagggttctcattaaccggctatggtgtaaactgggttcgccagcctccaggaaagggtctggagtggctgggaatgatatggggtg
atggaagcacagactataattcagctctcaaatccagactgagcatcaccaaggacaactccaagagccaagttttcttaaaaatgaa
cagtctgcaaactgatgacacagccagatactactgtgccagagatggttatagtaactttcattactatgttatggactactggggtcaa
ggaacctcagtcaccgtctcctcagatctggagcccaaatcttctgacaaaactcacacatccccaccgtccccagcacctgaactcc
tgggtggatcgtcagtcttcctcttccccccaaaacccaaggacaccctcatgatctcccggacccctgaggtcacatgcgtggtggt
ggacgtgagccacgaagaccctgaggtcaagttcaactggtacgtggacggcgtggaggtgcataatgccaagacaaagccgcg
ggaggagcagtacaacagcacgtaccgtgtggtcagcgtcctcaccgtcctgcaccaggactggctgaatggcaaggagtacaag
tgcaaggtctccaacaaagccctcccagcccccatcgagaaaaccatctccaaagccaaagggcagccccgagaaccacaggtgt
acaccctgcccccatcccgggatgagctgaccaagaaccaggtcagcctgacctgcctggtcaaaggcttctatcccagcgacatc
gccgtggagtgggagagcaatgggcagccggagaacaactacaagaccacgcctcccgtgctggactccgacggctccttcttcc
tctacagcaagctcaccgtggacaagagcaggtggcagcaggggaacgtcttctcatgctccgtgatgcatgaggctctgcacaac
cactacacgcagaagagcctctccctgtctccgggtaaagcggatccttcgaacatggacccattcctggtgctgctgcactcgctgt
ccggcagcctgtcgggcaacgatctgatggagctcaagttcttgtgccgcgagcgcgtgagcaaacgaaagctggagcgcgtgca
gagtggcctggacctgttcacggtgctgctggagcagaacgacctggagcgcgggcacaccgggctgctgcgcgagttgctggc
ctcgctgcgccgacacgatctactgcagcgcctggacgacttcgaggcggggacggcgaccgctgcgcccccgggggaggcag
atctgcaggtggcatttgacattgtgtgtgacaatgtggggagagactggaaaagactggcccgcgagctgaaggtgtctgaggcc
aagatggatgggattgaggagaagtacccccgaagtctgagtgagcgggtaagggagagtctgaaagtctggaagaatgctgaga
agaagaacgcctcggtggccggactggtcaaggcgctgcggacctgcaggctgaatctggtggctgacctggtggaagaagccc
aggaatctgtgagcaagagtgagaatatgtccccagtactaagggattcaactgtgtcttcctcagaaacaccctgactcgagatcgat
Amino acid sequence:
mdfqvqifsfllisasvimsrgvdivltqspaslavslgqratiscrasesveyyvtslmqwyqqkpgqppkllisaasnvesgvp
arfsgsgsgtdfslnihpveeddiamyfcqqsrkvpwtfgggtkleikrggggsggggsggggsqvqlkesgpglvapsqslsit
ctvsgfsltgygvnwvrqppgkglewlgmiwgdgstdynsalksrlsitkdnsksqvflkmnslqtddtaryycardgysnfh
yyvmdywgqgtsvtvssdlepkssdkthtsppspapellggssvflfppkpkdtlmisrtpevtcvvvdvshedpevkfnwy
vdgvevhnaktkpreeqynstyrvvsvltvlhqdwlngkeykckvsnkalpapiektiskakgqprepqvytlppsrdeltkn
qvsltclvkgfypsdiavewesngqpennykttppvldsdgsfflyskltvdksrwqqgnvfscsvmhealhnhytqkslslsp
gkadpsnmdpflvllhslsgslsgndlmelkflcrervskrklervqsgldlftvlleqndlerghtgllrellaslrrhdllqrlddfea
gtataappgeadlqvafdivcdnvgrdwkrlarelkvseakmdgieekyprslservreslkvwknaekknasvaglvkalrtc
rlnlvadlveeaqesvsksenmspvlrdstvsssetp
115. 2e12 scFv (SSS-P)H WCH2WCH3-mFADD-TM/CT
Nucleotide sequence:
aagcttatggattttcaagtgcagattttcagcttcctgctaatcagtgcttcagtcataatgtccagaggagtcgacattgtgctcaccca
atctccagcttctttggctgctctaggtcagagagccaccatctcctgcagagccagtgaaagtgttgaatattatgtcacaagttta
atgcagtggtaccaacagaaaccaggacagccacccaaactcctcatctctgctgcatccaacgtagaatctggggtccctgccagg
tttagtggcagtgggtctgggacagacttcagcctcaacatccatcctgtggaggaggatgatattgcaatgtatttctgtcagcaaagt
aggaaggttccttggacgttcggtggaggcaccaagctggaaatcaaacggggtggcggtggctcgggcggaggtgggtcgggt
ggcggcggatctcaggtgcagctgaaggagtcaggacctggcctggtggcgccctcacagagcctgtccatcacatgcaccgtct
cagggttctcattaaccggctatggtgtaaactgggttcgccagcctccaggaaagggtctggagtggctgggaatgatatggggtg
atggaagcacagactataattcagctctcaaatccagactgagcatcaccaaggacaactccaagagccaagttttcttaaaaatgaa
cagtctgcaaactgatgacacagccagatactactgtgccagagatggttatagtaactttcattactatgttatggactactggggtcaa
ggaacctcagtcaccgtctcctcagatctggagcccaaatcttctgacaaaactcacacatccccaccgtccccagcacctgaactcc
tgggtggaccgtcagtcttcctcttccccccaaaacccaaggacaccctcatgatctcccggacccctgaggtcacatgcgtggtggt
ggacgtgagccacgaagaccctgaggtcaagttcaactggtacgtggacggcgtggaggtgcataatgccaagacaaagccgcg
ggaggagcagtacaacagcacgtaccgtgtggtcagcgtcctcaccgtcctgcaccaggactggctgaatggcaaggagtacaag
tgcaaggtctccaacaaagccctcccagcccccatcgagaaaaceatctccaaagccaaagggcagccccgagaaccacaggtgt
acaccctgcccccatcccgggatgagctgaccaagaaccaggtcagcctgacctgcctggtcaaaggcttctatcccagcgacatc
gccgtggagtgggagagcaatgggcagccggagaacaactacaagaccacgcctcccgtgctggactccgacggctccttcttcc
tctacagcaagctcaccgtggacaagagcaggtggcagcaggggaacgtcttctcatgctccgtgatgcatgaggctctgcacaac
cactacacgcagaagagcctctccctgtctccgggtaaagcggatccttcgaacatggacccattcctggtgctgctgcactcgctgt
ccggcagcctgtcgggcaacgatctgatggagctcaagttcttgtgccgcgagcgcgtgagcaaacgaaagctggagcgcgtgca
gagtggcctggacctgttcacggtgctgctggagcagaacgacctggagcgcgggcacaccgggctgctgcgcgagttgctggc
ctcgctgcgccgacacgatctactgcagcgcctggacgacttcgaggcggggacggcgaccgctgcgcccccgggggaggcag
atctgcaggtggcatttgacattgtgtgtgacaatgtggggagagactggaaaagactggcccgcgagctgaaggtgtctgaggcc
aagatggatgggattgaggagaagtacccccgaagtctgagtgagcgggtaagggagagtctgaaagtctggaagaatgctgaga
agaagaacgcctcggtggccggactggtcaaggcgctgcggacctgcaggctgaatctggtggctgacctggtggaagaagccc
aggaatctgtgagcaagagtgagaatatgtccccagtactaagggattcaactgtgtcttcctcagaaacaccctgactcgagatcgat
Amino acid sequence:
mdfqvqifsfllisasvimsrgvdivltqspaslavslgqratiscrasesveyyvtslmqwyqqkpgqppkllisaasnvesgvp
arfsgsgsgtdfslnihpveeddiamyfcqqsrkvpwtfgggtkleikrggggsggggsggggsqvqlkesgpglvapsqslsit
ctvsgfsltgygvnwvrqppgkglewlgmiwgdgstdynsalksrlsitkdnsksqvflkmnslqtddtaryycardgysnfh
yyvmdywgqgtsvtvssdlepkssdkthtsppspapellggpsvflfppkpkdtlmisrtpevtcvvvdvshedpevkfnwy
vdgvevhnaktkpreeqynstyrvvsvltvlhqdwlngkeykckvsnkalpapiektiskakgqprepqvytlppsrdeltkn
qvsltclvkgfypsdiavewesngqpennykttppvldsdgsfflyskltvdksrwqqgnvfscsvmhealhnhytqkslslsp
gkadpsnmdpflvllhslsgslsgndlmelkflcrervskrklervqsgldlftvlleqndlerghtgllrellaslrrhdllqrlddfea
gtataappgeadlqvafdivcdnvgrdwkrlarelkvseakmdgieekyprslservreslkvwknaekknasvaglvkalrtc
rlnlvadlveeaqesvsksenmspvlrdstvsssetp
116. mcasp3-TM/CT
Nucleotide sequence:
Ggatccttcgaacatggagaacaacaaaacctcagtggattcaaaatccattaataattttgaagtaaagaccatacatgggagcaag
tcagtggactctgggatctatctggacagtagttacaaaatggattatcctgaaatgggcatatgcataataattaataataagaacttcc
ataagagcactggaatgtcatctcgctctggtacggatgtggacgcagccaacctcagagagacattcatgggcctgaaataccaag
tcaggaataaaaatgatcttactcgtgaagacattttggaattaatggatagtgtttctaaggaagatcatagcaaaaggagcagctttgt
gtgtgtgattctaagccatggtgatgaaggggtcatttatgggacaaatgggcctgttgaactgaaaaagttgactagcttcttcagag
gcgactactgccggagtctgactggaaagccgaaactcttcatcattcaggcctgccggggtacggagctggactgtggcattgaga
cagacagtgggactgatgaggagatggcttgccagaagataccggtggaggctgacttcctgtatgcttactctacagcacctggtta
ctattcctggagaaattcaaaggacgggtcgtggttcatccagtccctttgcagcatgctgaagctgtacgcgcacaagctagaatttat
gcacattctcactcgcgttaacaggaaggtggcaacggaattcgagtccttctccctggactccactttccacgcaaagaaacagatc
ccgtgtattgtgtccatgctcacgaaagaactgtacttttatcactagctcgagatcgatg
Amino acid sequence:
dpsnmennktsvdsksinnfevktihgsksvdsgiyldssykmdypemgiciiinnknfhkstgmssrsgtdvdaanlretfm
glkyqvrnkndltredilelmdsvskedhskrssfvcvilshgdegviygtngpvelkkltsffrgdycrsltgkpklfiiqacrgte
ldcgietdsgtdeemacqkipveadflyaystapgyyswrnskdgswfiqslcsmlklyahklefmhiltrvnrkvatefesfsl
dstfhakkqipcivsmltkelyfyh
117. 2e12 scFv (SSS-P)H WCH2WCH3-mcasp3-TM/CT
Nucleotide sequence:
aagcttatggattttcaagtgcagattttcagcttcctgctaatcagtgcttcagtcataatgtccagaggagtcgacattgtgctcaccca
atctccagcttctttggctgtgtctctaggtcagagagccaccatctcctgcagagccagtgaaagtgttgaatattatgtcacaagttta
atgcagtggtaccaacagaaaccaggacagccacccaaactcctcatctctgctgcatccaacgtagaatctggggtccctgccagg
tttagtggcagtgggtctgggacagacttcagcctcaacatccatcctgtggaggaggatgatattgcaatgtatttctgtcagcaaagt
aggaaggttccttggacgttcggtggaggcaccaagctggaaatcaaacggggtggcggtggctcgggcggaggtgggtcgggt
ggcggcggatctcaggtgcagctgaaggagtcaggacctggcctggtggcgccctcacagagcctgtccatcacatgcaccgtct
cagggttctcattaaccggctatggtgtaaactgggttcgccagcctccaggaaagggtctggagtggctgggaatgatatggggtg
atggaagcacagactataattcagctctcaaatccagactgagcatcaccaaggacaactccaagagccaagttttcttaaaaatgaa
cagtctgcaaactgatgacacagccagatactactgtgccagagatggttatagtaactttcattactatgttatggactactggggtcaa
ggaacctcagtcaccgtctcctcagatctggagcccaaatcttctgacaaaactcacacatccccaccgtccccagcacctgaactcc
tgggtggaccgtcagtcttcctcttccccccaaaacccaaggacaccctcatgatctcccggacccctgaggtcacatgcgtggtggt
ggacgtgagccacgaagaccctgaggtcaagttcaactggtacgtggacggcgtggaggtgcataatgccaagacaaagccgcg
ggaggagcagtacaacagcacgtaccgtgtggtcagcgtcctcaccgtcctgcaccaggactggctgaatggcaaggagtacaag
tgcaaggtctccaacaaagccctcccagcccccatcgagaaaaccatctccaaagccaaagggcagccccgagaaccacaggtgt
acaccctgcccccatcccgggatgagctgaccaagaaccaggtcagcctgacctgcctggtcaaaggcttctatcccagcgacatc
gccgtggagtgggagagcaatgggcagccggagaacaactacaagaccacgcctcccgtgctggactccgacggctccttcttcc
tctacagcaagctcaccgtggacaagagcaggtggcagcaggggaacgtcttctcatgctccgtgatgcatgaggctctgcacaac
cactacacgcagaagagcctctccctgtctccgggtaaagcggatccttcgaacatggagaacaacaaaacctcagtggattcaaaa
tccattaataattttgaagtaaagaccatacatgggagcaagtcagtggactctgggatctatctggacagtagttacaaaatggattatc
ctgaaatgggcatatgcataataattaataataagaacttccataagagcactggaatgtcatctcgctctggtacggatgtggacgca
gccaacctcagagagacattcatgggcctgaaataccaagtcaggaataaaaatgatcttactcgtgaagacattttggaattaatgga
tagtgtttctaaggaagatcatagcaaaaggagcagctttgtgtgtgtgattctaagccatggtgatgaaggggtcatttatgggacaaa
tgggcctgttgaactgaaaaatgactagcttcttcagaggcgactactgccggagtctgactggaaagccgaaactcttcatcattc
aggcctgccggggtacggagctggactgtggcattgagacagacagtgggactgatgaggagatggcttgccagaagataccggt
ggaggctgacttcctgtatgcttactctacagcacctggttactattcctggagaaattcaaaggacgggtcgtggttcatccagtccctt
tgcagcatgctgaagctgtacgcgcacaagctagaatttatgcacattctcactcgcgttaacaggaaggtggcaacggaattcgagt
ccttctccctggactccactttccacgcaaagaaacagatcccgtgtattgtgtccatgctcacgaaagaactgtacttttatcactagct
cgagatcgatg
Amino acid sequence:
mdfqvqifsfllisasvimsrgvdivltqspaslavslgqratiscrasesveyyvtslmqwyqqkpgqppkllisaasnvesgvp
arfsgsgsgtdfslnihpveeddiamyfcqqsrkvpwtfgggtkleikrggggsggggsggggsqvqlkesgpglvapsqslsit
ctvsgfsltgygvnwvrqppgkglewlgmiwgdgstdynsalksrlsitkdnsksqvflkmnslqtddtaryycardgysnfh
yyvmdywgqgtsvtvssdlepkssdkthtsppspapellggpsvflfppkpkdtlmisrtpevtcvvvdvshedpevkfnwy
vdgvevhnaktkpreeqynstyrvvsvltvlhqdwlngkeykckvsnkalpapiektiskakgqprepqvytlppsrdeltkn
qvsltclvkgfypsdiavewesngqpennykttppvldsdgsfflyskltvdksrwqqgnvfscsvmhealhnhytqkslslsp
gkadpsnmennktsvdsksinnfevktihgsksvdsgiyldssykmdypemgiciiinnknfhkstgmssrsgtdvdaanlre
tfmglkyqvrnkndltredilelmdsvskedhskrssfvcvilshgdegviygtngpvelkkltsffrgdycrsltgkpklfiiqacr
gteldcgietdsgtdeemacqkipveadflyaystapgyyswrnskdgswfiqslcsmlklyahklefmhiltrvnrkvatefes
fsldstfhakkqipcivsmltkelyfyh
118. 2e12 scFv (SSS-P)H P238SCH2WCH3-mcasp3-TM/CT
Nucleotide sequence:
aagcttatggattttcaagtgcagattttcagcttcctgctaatcagtgcttcagtcataatgtccagaggagtcgacattgtgctcaccca
atctccagcttctttggctgtgtctctaggtcagagagccaccatctcctgcagagccagtgaaagtgttgaatattatgtcacaagttta
atgcagtggtaccaacagaaaccaggacagccacccaaactcctcatctctgctgcatccaacgtagaatctggggtccctgccagg
tttagtggcagtgggtctgggacagacttcagcctcaacatccatcctgtggaggaggatgatattgcaatgtatttctgtcagcaaagt
aggaaggttccttggacgttcggtggaggcaccaagctggaaatcaaacggggtggcggtggctcgggcggaggtgggtcgggt
ggcggcggatctcaggtgcagctgaaggagtcaggacctggcctggtggcgccctcacagagcctgtccatcacatgcaccgtct
cagggttctcattaaccggctatggtgtaaactgggttcgccagcctccaggaaagggtctggagtggctgggaatgatatggggtg
atggaagcacagactataattcagctctcaaatccagactgagcatcaccaaggacaactccaagagccaagttttcttaaaaatgaa
cagtctgcaaactgatgacacagccagatactactgtgccagagatggttatagtaactttcattactatgttatggactactggggtcaa
ggaacctcagtcaccgtctcctcagatctggagcccaaatcttctgacaaaactcacacatccccaccgtccccagcacctgaactcc
tgggtggatcgtcagtcttcctcttccccccaaaacccaaggacaccctcatgatctcccggacccctgaggtcacatgcgtggtggt
ggacgtgagccacgaagaccctgaggtcaagttcaactggtacgtggacggcgtggaggtgcataatgccaagacaaagccgcg
ggaggagcagtacaacagcacgtaccgtgtggtcagcgtcctcaccgtcctgcaccaggactggctgaatggcaaggagtacaag
tgcaaggtctccaacaaagccctcccagcccccatcgagaaaaccatctccaaagccaaagggcagccccgagaaccacaggtgt
acaccctgcccccatcccgggatgagctgaccaagaaccaggtcagcctgacctgcctggtcaaaggcttctatcccagcgacatc
gccgtggagtgggagagcaatgggcagccggagaacaactacaagaccacgcetcccgtgctggactccgacggctccttcttcc
tctacagcaagctcaccgtggacaagagcaggtggcagcaggggaacgtcttctcatgctccgtgatgcatgaggctctgcacaac
cactacacgcagaagagcctctccctgtctccgggtaaagcggatccttcgaattcgaacatggagaacaacaaaacctcagtggat
tcaaaatccattaataattttgaagtaaagaccatacatgggagcaagtcagtggactctgggatctatctggacagtagttacaaaatg
gattatcctgaaatgggcatatgcataataattaataataagaacttccataagagcactggaatgtcatctcgctctggtacggatgtgg
acgcagccaacctcagagagacattcatgggcctgaaataccaagtcaggaataaaaatgatcttactcgtgaagacattttggaatta
atggatagtgtttctaaggaagatcatagcaaaaggagcagctttgtgtgtgtgattctaagccatggtgatgaaggggtcatttatggg
acaaatgggcctgttgaactgaaaaagttgactagcttcttcagaggcgactactgccggagtctgactggaaagccgaaactcttca
tcattcaggcctgccggggtacggagctggactgtggcattgagacagacagtgggactgatgaggagatggcttgccagaagata
ccggtggaggctgacttcctgtatgcttactctacagcacctggttactattcctggagaaattcaaaggacgggtcgtggttcatccag
tccctttgcagcatgctgaagctgtacgcgcacaagctagaatttatgcacattctcactcgcgttaacaggaaggtggcaacggaatt
cgagtccttctccctggactccactttccacgcaaagaaacagatcccgtgtattgtgtccatgctcacgaaagaactgtacttttatcac
tagctcgagatcgatga
Amino acid sequence:
mdfqvqifsfllisasvimsrgvdivltqspaslavslgqratiscrasesveyyvtslmqwyqqkpgqppkllisaasnvesgvp
arfsgsgsgtdfslnihpveeddiamyfcqqsrkvpwtfgggtkleikrggggsggggsggggsqvqlkesgpglvapsqslsit
ctvsgfsltgygvnwvrqppgkglewlgmiwgdgstdynsalksrlsitkdnsksqvflkmnslqtddtaryycardgysnfh
yyvmdywgqgtsvtvssdlepkssdkthtsppspapellggssvflfppkpkdtlmisrtpevtcvvvdvshedpevkfnwy
vdgvevhnaktkpreeqynstyrvvsvltvlhqdwlngkeykckvsnkalpapiektiskakgqprepqvytlppsrdeltkn
qvsltclvkgfypsdiavewesngqpennykttppvldsdgsfflyskltvdksrwqqgnvfscsvmhealhnhytqkslslsp
gkadpsnsnmennktsvdsksinnfevktihgsksvdsgiyldssykmdypemgiciiinnknfhkstgmssrsgtdvdaan
lretfmglkyqvrnkndltredilelmdsvskedhskrssfvcvilshgdegviygtngpvelkkltsffrgdycrsltgkpklfiiq
acrgteldcgietdsgtdeemacqkipveadflyaystapgyyswrnskdgswfiqslcsmlklyahklefmhiltrvnrkvate
fesfsldstfhakkqipcivsmltkelyfyh
119. mcasp8-TM/CT
Nucleotide sequence:
ttcgaacatggatttccagagttgtctttatgctattgctgaagaactgggcagtgaagacctggctgccctcaagttcctgtgcttggac
tacatcccacacaagaagcaggagaccatcgaggatgcccagaagctatttctgaggctgcgggaaaaggggatgttggaggaag
gcaatctgtctttcctgaaagagctgcttttccacatcagtcggtgggacctgctggtcaacttcctagactgcaaccgagaggagatg
gtgagagagctgcgggatccagacaatgcccagatttctccctacagggtcatgctctttaagctctcagaagaagtgagcgagttgg
aattgagatcttttaagttccttttgaacaatgagatccccaaatgtaagctggaagatgacttgagcctgcttgaaatttttgtagaaatg
gagaagaggaccatgctggcagaaaataacttggaaaccctaaaatcaatctgtgaccaggtcaacaagagcctgctggggaagat
cgaggattatgaaagatcaagcacagagagaagaatgagccttgaaggaagggaagagttgccaccttcagttttggatgagatga
gcctcaaaatggcggaactgtgtgactcgccaagagaacaagacagtgagtcacggacttcagacaaagtttaccaaatgaagaac
aaacctcggggatactgtctgatcatcaacaatcatgatttcagcaaggcccgggaagacataacccaactccgaaaaatgaaggac
agaaaaggaacagactgtgataaagaggctctgagtaagacctttaaggagcttcattttgagatagtatcttacgacgactgcactgc
aaatgaaatccacgagattctagaaggctaccaaagcgcagaccacaagaacaaagactgcttcatctgctgtatcctatcccacggt
gacaagggtgtcgtctatggaacggatgggaaggaggcctccatctatgacctgacatcttacttcactggttcaaagtgcccttccct
gtctgggaaacccaagatctttttcattcaggcttgccaaggaagtaacttccagaaaggagtgcctgatgaggcaggcttcgagcaa
cagaaccacactttagaagtggattcatcatctcacaagaactatattccggatgaggcagactttctgctgggaatggctacggtgaa
gaactgcgtttcctaccgagatcctgtgaatggaacctggtatattcagtcactttgccagagcctgagggaaagatgtcctcaaggag
atgacattcttagcatcctgactggcgtgaactatgacgtgagcaataaagacgacaggaggaacaagggaaagcagatgccacag
cccaccttcacactacggaagaagctcttcttccctccctaatgactcgagatcgatt
Amino acid sequence:
snmdfqsclyaiaeelgsedlaalkflcldyiphkkqetiedaqklflrlrekgmleegnlsflkellfhisrwdllvnfldcnreem
vrelrdpdnaqispyrvmlfklseevselelrsfkfllnneipkckleddlslleifvemekrtmlaennletlksicdqvnksllgki
edyerssterrmslegreelppsvldemslkmaelcdspreqdsesrtsdkvyqmknkprgycliinnhdfskareditqlrkm
kdrkgtdcdkealsktfkelhfeivsyddctaneiheilegyqsadhknkdcficcilshgdkgvvygtdgkeasiydltsyftgs
kcpslsgkpkiffiqacqgsnfqkgvpdeagfeqqnhtlevdssshknyipdeadfllgmatvkncvsyrdpvngtwyiqslc
qslrercpqgddilsiltgvnydvsnkddrrnkgkqmpqptftlrkklffpp
120. 2e12 scFv hIgG1 (SSS-P)H WCH2 WCH3-mcasp8-TM/CT
Nucleotide sequence:
aagcttatggattttcaagtgcagattttcagcttcctgctaatcagtgcttcagtcataatgtccagaggagtcgacattgtgctcaccca
atctccagcttctttggctgtgtctctaggtcagagagccaccatctcctgcagagccagtgaaagtgttgaatattatgtcacaagttta
atgcagtggtaccaacagaaaccaggacagccacccaaactcctcatctctgctgcatccaacgtagaatctggggtccctgccagg
tttagtggcagtgggtctgggacagacttcagcctcaacatccatcctgtggaggaggatgatattgcaatgtatttctgtcagcaaagt
aggaaggttccttggacgttcggtggaggcaccaagctggaaatcaaacggggtggcggtggctcgggcggaggtgggtcgggt
ggcggcggatctcaggtgcagctgaaggagtcaggacctggcctggtggcgccctcacagagcctgtccatcacatgcaccgtct
cagggttctcattaaccggctatggtgtaaactgggttcgccagcctccaggaaagggtctggagtggctgggaatgatatggggtg
atggaagcacagactataattcagctctcaaatccagactgagcatcaccaaggacaactccaagagccaagttttcttaaaaatgaa
cagtctgcaaactgatgacacagccagatactactgtgccagagatggttatagtaactttcattactatgttatggactactggggtcaa
ggaacctcagtcaccgtctcctcagatctggagcccaaatcttctgacaaaactcacacatccccaccgtccccagcacctgaactcc
tgggtggaccgtcagtcttcctcttccccccaaaacccaaggacaccctcatgatctcccggacccctgaggtcacatgcgtggtggt
ggacgtgagccacgaagaccctgaggtcaagttcaactggtacgtggacggcgtggaggtgcataatgccaagacaaagccgcg
ggaggagcagtacaacagcacgtaccgtgtggtcagcgtcctcaccgtcctgcaccaggactggctgaatggcaaggagtacaag
tgcaaggtctccaacaaagccctcccagcccccatcgagaaaaccatctccaaagccaaagggcagccccgagaaccacaggtgt
acaccctgcccccatcccgggatgagctgaccaagaaccaggtcagcctgacctgcctggtcaaaggcttctatcccagcgacatc
gccgtggagtgggagagcaatgggcagccggagaacaactacaagaccacgcctcccgtgctggactccgacggctccttcttcc
tctacagcaagctcaccgtggacaagagcaggtggcagcaggggaacgtcttctcatgctccgtgatgcatgaggctctgcacaac
cactacacgcagaagagcctctccctgtctccgggtaaagcggatccttcgaacatggatttccagagttgtctttatgctattgctgaa
gaactgggcagtgaagacctggctgccctcaagttcctgtgcttggactacatcccacacaagaagcaggagaccatcgaggatgc
ccagaagctatttctgaggctgcgggaaaaggggatgttggaggaaggcaatctgtctttcctgaaagagctgcttttccacatcagtc
ggtgggacctgctggtcaacttcctagactgcaaccgagaggagatggtgagagagctgcgggatccagacaatgcccagatttct
ccctacagggtcatgctctttaagctctcagaagaagtgagcgagttggaattgagatcttttaagttccttttgaacaatgagatcccca
aatgtaagctggaagatgacttgagcctgcttgaaatttttgtagaaatggagaagaggaccatgctggcagaaaataacttggaaac
cctaaaatcaatctgtgaccaggtcaacaagagcctgctggggaagatcgaggattatgaaagatcaagcacagagagaagaatga
gccttgaaggaagggaagagttgccaccttcagttttggatgagatgagcctcaaaatggcggaactgtgtgactcgccaagagaac
aagacagtgagtcacggacttcagacaaagtttaccaaatgaagaacaaacctcggggatactgtctgatcatcaacaatcatgatttc
agcaaggcccgggaagacataacccaactccgaaaaatgaaggacagaaaaggaacagactgtgataaagaggctctgagtaag
acctttaaggagcttcattttgagatagtatcttacgacgactgcactgcaaatgaaatccacgagattctagaaggctaccaaagcgc
agaccacaagaacaaagactgcttcatctgctgtatcctatcccacggtgacaagggtgtcgtctatggaacggatgggaaggaggc
ctccatctatgacctgacatcttacttcactggttcaaagtgcccttccctgtctgggaaacccaagatctttttcattcaggcttgccaag
gaagtaacttccagaaaggagtgcctgatgaggcaggcttcgagcaacagaaccacactttagaagtggattcatcatctcacaaga
actatattccggatgaggcagactttctgctgggaatggctacggtgaagaactgcgtttcctaccgagatcctgtgaatggaacctgg
tatattcagtcactttgccagagcctgagggaaagatgtcctcaaggagatgacattcttagcatcctgactggcgtgaactatgacgt
gagcaataaagacgacaggaggaacaagggaaagcagatgccacagcccaccttcacactacggaagaagctcttcttccctccc
taatgactcgagatcgatt
Amino acid sequence:
mdfqvqifsfllisasvimsrgvdivltqspaslavslgqratiscrasesveyyvtslmqwyqqkpgqppkllisaasnvesgvp
arfsgsgsgtdfslnihpveeddiamyfcqqsrkvpwtfgggtkleikrggggsggggsggggsqvqlkesgpglvapsqslsit
ctvsgfsltgygvnwvrqppgkglewlgmiwgdgstdynsalksrlsitkdnsksqvflkmnslqtddtaryycardgysnfh
yyvmdywgqgtsvtvssdlepkssdkthtsppspapellggpsvflfppkpkdtlmisrtpevtcvvvdvshedpevkfnwy
vdgvevhnaktkpreeqynstyrvvsvltvlhqdwlngkeykckvsnkalpapiektiskakgqprepqvytlppsrdeltkn
qvsltclvkgfypsdiavewesngqpennykttppvldsdgsfflyskltvdksrwqqgnvfscsvmhealhnhytqkslslsp
gkadpsnmdfqsclyaiaeelgsedlaalkflcldyiphkkqetiedaqklflrlrekgmleegnlsflkellfhisrwdllvnfldc
nreemvrelrdpdnaqispyrvmlfklseevselelrsfkfllnneipkckleddlslleifvemekrtmlaennletlksicdqvn
ksllgkiedyerssterrmslegreelppsvldemslkmaelcdspreqdsesrtsdkvyqmknkprgycliinnhdfskaredi
tqlrkmkdrkgtdcdkealsktfkelhfeivsyddctaneiheilegyqsadhknkdcficcilshgdkgvvygtdgkeasiydlt
syftgskcpslsgkpkiffiqacqgsnfqkgvpdeagfeqqnhtlevdssshknyipdeadfllgmatvkncvsyrdpvngtw
yiqslcqslrercpqgddilsiltgvnydvsnkddrrnkgkqmpqptftlrkklftpp
121. 2e12 scFv hIgG1 (SSS-P)H P238SCH2 WCH3-mcasp8-TM/CT
Nucleotide sequence:
aagcttatggattttcaagtgcagattttcagcttcctgctaatcagtgcttcagtcataatgtccagaggagtcgacattgtgctcaccca
atctccagcttctttggctgtctctaggtcagagagccaccatctcctgcagagccagtgaaagtgttgaatattatgtcacaagttta
atgcagtggtaccaacagaaaccaggacagccacccaaactcctcatctctgctgcatccaacgtagaatctggggtccctgccagg
tttagtggcagtgggtctgggacagacttcagcctcaacatccatcctgtggaggaggatgatattgcaatgtatttctgtcagcaaagt
aggaaggttccttggacgttcggtggaggcaccaagctggaaatcaaacggggtggcggtggctcgggcggaggtgggtcgggt
ggcggcggatctcaggtgcagctgaaggagtcaggacctggcctggtggcgccctcacagagcctgtccatcacatgcaccgtct
cagggttctcattaaccggctatggtgtaaactgggttcgccagcctccaggaaagggtctggagtggctgggaatgatatggggtg
atggaagcacagactataattcagctctcaaatccagactgagcatcaccaaggacaactccaagagccaagttttcttaaaaatgaa
cagtctgcaaactgatgacacagccagatactactgtgccagagatggttatagtaactttcattactatgttatggactactggggtcaa
ggaacctcagtcaccgtctcctcagatctggagcccaaatcttctgacaaaactcacacatccccaccgtccccagcacctgaactcc
tgggtggatcgtcagtcttcctcttccccccaaaacccaaggacaccctcatgatctcccggacccctgaggtcacatgcgtggtggt
ggacgtgagccacgaagaccctgaggtcaagttcaactggtacgtggacggcgtggaggtgcataatgccaagacaaagccgcg
ggaggagcagtacaacagcacgtaccgtgtggtcagcgtcctcaccgtcctgcaccaggactggctgaatggcaaggagtacaag
tgcaaggtctccaacaaagccctcccagcccccatcgagaaaaccatctccaaagccaaagggcagccccgagaaccacaggtgt
acaccctgcccccatcccgggatgagctgaccaagaaccaggtcagcctgacctgcctggtcaaaggcttctatcccagcgacatc
gccgtggagtgggagagcaatgggcagccggagaacaactacaagaccacgcctcccgtgctggactccgacggctccttcttcc
tctacagcaagctcaccgtggacaagagcaggtggcagcaggggaacgtcttctcatgctccgtgatgcatgaggctctgcacaac
cactacacgcagaagagcctctccctgtctccgggtaaagcggatccttcgaacatggatttccagagttgtctttatgctattgctgaa
gaactgggcagtgaagacctggctgccctcaagttcctgtgcttggactacatcccacacaagaagcaggagaccatcgaggatgc
ccagaagctatttctgaggctgcgggaaaaggggatgttggaggaaggcaatctgtctttcctgaaagagctgcttttccacatcagtc
ggtgggacctgctggtcaacttcctagactgcaaccgagaggagatggtgagagagctgcgggatccagacaatgcccagatttct
ccctacagggtcatgctctttaagctctcagaagaagtgagcgagttggaattgagatcttttaagttccttttgaacaatgagatcccca
aatgtaagctggaagatgacttgagcctgcttgaaatttttgtagaaatggagaagaggaccatgctggcagaaaataacttggaaac
cctaaaatcaatctgtgaccaggtcaacaagagcctgctggggaagatcgaggattatgaaagatcaagcacagagagaagaatga
gccttgaaggaagggaagagttgccaccttcagttttggatgagatgagcctcaaaatggcggaactgtgtgactcgccaagagaac
aagacagtgagtcacggacttcagacaaagtttaccaaatgaagaacaaacctcggggatactgtctgatcatcaacaatcatgatttc
agcaaggcccgggaagacataacccaactccgaaaaatgaaggacagaaaaggaacagactgtgataaagaggctctgagtaag
acctttaaggagcttcattttgagatagtatcttacgacgactgcactgcaaatgaaatccacgagattctagaaggctaccaaagcgc
agaccacaagaacaaagactgcttcatctgctgtatcctatcccacggtgacaagggtgtcgtctatggaacggatgggaaggaggc
ctccatctatgacctgacatcttacttcactggttcaaagtgcccttccctgtctgggaaacccaagatctttttcattcaggcttgccaag
gaagtaacttccagaaaggagtgcctgatgaggcaggcttcgagcaacagaaccacactttagaagtggattcatcatctcacaaga
actatattccggatgaggcagactttctgctgggaatggctacggtgaagaactgcgtttcctaccgagatcctgtgaatggaacctgg
tatattcagtcactttgccagagcctgagggaaagatgtcctcaaggagatgacattcttagcatcctgactggcgtgaactatgacgt
gagcaataaagacgacaggaggaacaagggaaagcagatgccacagcccaccttcacactacggaagaagctcttcttccctccc
taatgactcgagatcgattc
Amino acid sequence:
mdfqvqifsfllisasvimsrgvdivltqspaslavslgqratiscrasesveyyvtslmqwyqqkpgqppkllisaasnvesgvp
arfsgsgsgtdfslnihpveeddiamyfcqqsrkvpwtfgggtkleikrggggsggggsggggsqvqlkesgpglvapsqslsit
ctvsgfsltgygvnwvrqppgkglewlgmiwgdgstdynsalksrlsitkdnsksqvflkmnslqtddtaryycardgysnfh
yyvmdywgqgtsvtvssdlepkssdkthtsppspapellggssvflfppkpkdtlmisrtpevtcvvvdvshedpevkfnwy
vdgvevhnaktkpreeqynstyrvvsvltvlhqdwlngkeykckvsnkalpapiektiskakgqprepqvytlppsrdeltkn
qvsltclvkgfypsdiavewesngqpennykttppvldsdgsfflyskltvdksrwqqgnvfscsvmhealhnhytqkslslsp
gkadpsnmdfqsclyaiaeelgsedlaalkflcldyiphkkqetiedaqklflrlrekgmleegnlsflkellfhisrwdllvnfldc
nreemvrelrdpdnaqispyrvmlfklseevselelrsfkfllnneipkckleddlslleifvemekrtmlaennletlksicdqvn
ksllgkiedyerssterrmslegreelppsvldemslkmaelcdspreqdsesrtsdkvyqmknkprgycliinnhdfskaredi
tqlrkmkdrkgtdcdkealsktfkelhfeivsyddctaneiheilegyqsadhknkdcficcilshgdkgvvygtdgkeasiydlt
syftgskcpslsgkpkiffiqacqgsnfqkgvpdeagfeqqnhtlevdssshknyipdeadfllgmatvkncvsyrdpvngtw
yiqslcqslrercpqgddilsiltgvnydvsnkddrrnkgkqmpqptftlrkklffpp
122. hcasp3-TM/CT
Nucleotide sequence:
Ggatccttcgaacatggagaacactgaaaactcagtggattcaaaatccattaaaaatttggaaccaaagatcatacatggaagcga
atcaatggactctggaatatccctggacaacagttataaaatggattatcctgagatgggtttatgtataataattaataataagaattttca
taaaagcactggaatgacatctcggtctggtacagatgtcgatgcagcaaacctcagggaaacattcagaaacttgaaatatgaagtc
aggaataaaaatgatcttacacgtgaagaaattgtggaattgatgcgtgatgtttctaaagaagatcacagcaaaaggagcagttttgtt
tgtgtgcttctgagccatggtgaagaaggaataatttttggaacaaatggacctgttgacctgaaaaaaataacaaactttttcagaggg
gatcgttgtagaagtctaactggaaaacccaaacttttcattattcaggcctgccgtggtacagaactggactgtggcattgagacaga
cagtggtgttgatgatgacatggcgtgtcataaaataccagtggaggccgacttcttgtatgcatactccacagcacctggttattattct
tggcgaaattcaaaggatggctcctggttcatccagtcgctttgtgccatgctgaaacagtatgccgacaagcttgaatttatgcacatt
cttacccgggttaaccgaaaggtggcaacagaatttgagtccttttcctttgacgctacttttcatgcaaagaaacagattccatgtattgt
ttccatgctcacaaaagaactctatttttatcactaactcgagatcgata
Amino acid sequence:
dpsnmentensvdsksiknlepkiihgsesmdsgisldnsykmdypemglciiinnknfhkstgmtsrsgtdvdaanlretfrn
lkyevrnkndltreeivelmrdvskedhskrssfvcvllshgeegiifgtngpvdlkkitnffrgdrcrsltgkpklfiiqacrgteld
cgietdsgvdddmachkipveadflyaystapgyyswrnskdgswfiqslcamlkqyadklefmhiltrvnrkvatefesfsfd
atfhakkqipcivsmltkelyfyh
123. 2e12 scFv hIgG1 (SSS-P)H WCH2 WCH3-hcasp3-TM/CT
Nucleotide sequence:
aagcttatggatttcaagtgcagattttcagcttcctgctaatcagtgcttcagtcataatgtccagaggagtcgacattgtgctcaccca
atctccagcttctttggctgtgtctctaggtcagagagccaccatctcctgcagagccagtgaaagtgttgaatattatgtcacaagttta
atgcagtggtaccaacagaaaccaggacagccacccaaactcctcatctctgctgcatccaacgtagaatctggggtccctgccagg
tttagtggcagtgggtctgggacagacttcagcctcaacatccatcctgtggaggaggatgatattgcaatgtatttctgtcagcaaagt
aggaaggttccttggacgttcggtggaggcaccaagctggaaatcaaacggggtggcggtggctcgggcggaggtgggtcgggt
ggcggcggatctcaggtgcagctgaaggagtcaggacctggcctggtggcgccctcacagagcctgtccatcacatgcaccgtct
cagggttctcattaaccggctatggtgtaaactgggttcgccagcctccaggaaagggtctggagtggctgggaatgatatggggtg
atggaagcacagactataattcagctctcaaatccagactgagcatcaccaaggacaactccaagagccaagttttcttaaaaatgaa
cagtctgcaaactgatgacacagccagatactactgtgccagagatggttatagtaactttcattactatgttatggactactggggtcaa
ggaacctcagtcaccgtctcctcagatctggagcccaaatcttctgacaaaactcacacatccccaccgtccccagcacctgaactcc
tgggtggaccgtcagtcttcctcttccccccaaaacccaaggacaccctcatgatctcccggacccctgaggtcacatgcgtggtggt
ggacgtgagccacgaagaccctgaggtcaagttcaactggtacgtggacggcgtggaggtgcataatgccaagacaaagccgcg
ggaggagcagtacaacagcacgtaccgtgtggtcagcgtcctcaccgtcctgcaccaggactggctgaatggcaaggagtacaag
tgcaaggtctccaacaaagccctcccagcccccatcgagaaaaccatctccaaagccaaagggcagccccgagaaccacaggtgt
acaccctgcccccatcccgggatgagctgaccaagaaccaggtcagcctgacctgcctggtcaaaggcttctatcccagcgacatc
gccgtggagtgggagagcaatgggcagccggagaacaactacaagaccacgcctcccgtgctggactccgacggctccttcttcc
tctacagcaagctcaccgtggacaagagcaggtggcagcaggggaacgtcttctcatgctccgtgatgcatgaggctctgcacaac
cactacacgcagaagagcctctccctgtctccgggtaaagcggatccttcgaacatggagaacactgaaaactcagtggattcaaaa
tccattaaaaatttggaaccaaagatcatacatggaagcgaatcaatggactctggaatatccctggacaacagttataaaatggattat
cctgagatgggtttatgtataataattaataataagaattttcataaaagcactggaatgacatctcggtctggtacagatgtcgatgcag
caaacctcagggaaacattcagaaacttgaaatatgaagtcaggaataaaaatgatcttacacgtgaagaaattgtggaattgatgcgt
gatgtttctaaagaagatcacagcaaaaggagcagttttgtttgtgtgcttctgagccatggtgaagaaggaataatttttggaacaaat
ggacctgttgacctgaaaaaaataacaaactttttcagaggggatcgttgtagaagtctaactggaaaacccaaacttttcattattcag
gcctgccgtggtacagaactggactgtggcattgagacagacagtggtgttgatgatgacatggcgtgtcataaaataccagtggag
gccgacttcttgtatgcatactccacagcacctggttattattcttggcgaaattcaaaggatggctcctggttcatccagtcgctttgtgc
catgctgaaacagtatgccgacaagcttgaatttatgcacattcttacccgggttaaccgaaaggtggcaacagaatttgagtccttttc
ctttgacgctacttttcatgcaaagaaacagattccatgtattgtttccatgctcacaaaagaactctatttttatcactaactcgagatcgat
a
Amino acid sequence:
mdfqvqifsfllisasvimsrgvdivltqspaslavslgqratiscrasesveyyvtslmqwyqqkpgqppkllisaasnvesgvp
arfsgsgsgtdfslnihpveeddiamyfcqqsrkvpwtfgggtkleikrggggsggggsggggsqvqlkesgpglvapsqslsit
ctvsgfsltgygvnwvrqppgkglewlgmiwgdgstdynsalksrlsitkdnsksqvflkmnslqtddtaryycardgysnfh
yyvmdywgqgtsvtvssdlepkssdkthtsppspapellggpsvflfppkpkdtlmisrtpevtcvvvdvshedpevkfnwy
vdgvevhnaktkpreeqynstyrvvsvltvlhqdwlngkeykckvsnkalpapiektiskakgqprepqvytlppsrdeltkn
qvsltclvkgfypsdiavewesngqpennykttppvldsdgsfflyskltvdksrwqqgnvfscsvmhealhnhytqkslslsp
gkadpsnmentensvdsksiknlepkiihgsesmdsgisldnsykmdypemglciiinnknfhkstgmtsrsgtdvdaanlre
tfrnlkyevrnkndltreeivelmrdvskedhskrssfvcvllshgeegiifgtngpvdlkkitnffrgdrcrsltgkpklfiiqacrgt
eldcgietdsgvdddmachkipveadflyaystapgyyswrnskdgswfiqslcamlkqyadklefmhiltrvnrkvatefesf
sfdatfhakkqipcivsmltkelyfyh
123. 2e12 scFv hIgG1 (SSS-P)H P238SCH2 WCH3-hcasp3-TM/CT
Nucleotide sequence:
aagcttatggattttcaagtgcagattttcagcttcctgctaatcagtgcttcagtcataatgtccagaggagtcgacattgtgctcaccca
atctccagcttctttggctgtgtctctaggtcagagagccaccatctcctgcagagccagtgaaagtgttgaatattatgtcacaagttta
atgcagtggtaccaacagaaaccaggacagccacccaaactcctcatctctgctgcatccaacgtagaatctggggtccctgccagg
tttagtggcagtgggtctgggacagacttcagcctcaacatccatcctgtggaggaggatgatattgcaatgtatttctgtcagcaaagt
aggaaggttccttggacgttcggtggaggcaccaagctggaaatcaaacggggtggcggtggctcgggcggaggtgggtcgggt
ggcggcggatctcaggtgcagctgaaggagtcaggacctggcctggtggcgccctcacagagcctgtccatcacatgcaccgtct
cagggttctcattaaccggctatggtgtaaactgggttcgccagcctccaggaaagggtctggagtggctgggaatgatatggggtg
atggaagcacagactataattcagctctcaaatccagactgagcatcaccaaggacaactccaagagccaagttttcttaaaaatgaa
cagtctgcaaactgatgacacagccagatactactgtgccagagatggttatagtaactttcattactatgttatggactactggggtcaa
ggaacctcagtcaccgtctcctcagatctggagcccaaatcttctgacaaaactcacacatccccaccgtccccagcacctgaactcc
tgggtggatcgtcagtcttcctcttccccccaaaacccaaggacaccctcatgatctcccggacccctgaggtcacatgcgtggtggt
ggacgtgagccacgaagaccctgaggtcaagttcaactggtacgtggacggcgtggaggtgcataatgccaagacaaagccgcg
ggaggagcagtacaacagcacgtaccgtgtggtcagcgtcctcaccgtcctgcaccaggactggctgaatggcaaggagtacaag
tgcaaggtctccaacaaagccctcccagcccccatcgagaaaaccatctccaaagccaaagggcagccccgagaaccacaggtgt
acaccctgcccccatcccgggatgagctgaccaagaaccaggtcagcctgacctgcctggtcaaaggcttctatcccagcgacatc
gccgtggagtgggagagcaatgggcagccggagaacaactacaagaccacgcctcccgtgctggactccgacggctccttcttcc
tctacagcaagctcaccgtggacaagagcaggtggcagcaggggaacgtcttctcatgctccgtgatgcatgaggctctgcacaac
cactacacgcagaagagcctctccctgtctccgggtaaagcggatccttcgaacatggagaacactgaaaactcagtggattcaaaa
tccattaaaaatttggaaccaaagatcatacatggaagcgaatcaatggactctggaatatccctggacaacagttataaaatggattat
cctgagatgggtttatgtataataattaataataagaattttcataaaagcactggaatgacatctcggtctggtacagatgtcgatgcag
caaacctcagggaaacattcagaaacttgaaatatgaagtcaggaataaaaatgatcttacacgtgaagaaattgtggaattgatgcgt
gatgtttctaaagaagatcacagcaaaaggagcagttttgtttgtgtgcttctgagccatggtgaagaaggaataatttttggaacaaat
ggacctgttgacctgaaaaaaataacaaactttttcagaggggatcgttgtagaagtctaactggaaaacccaaacttttcattattcag
gcctgccgtggtacagaactggactgtggcattgagacagacagtggtgttgatgatgacatggcgtgtcataaaataccagtggag
gccgacttcttgtatgcatactccacagcacctggttattattcttggcgaaattcaaaggatggctcctggttcatccagtcgctttgtgc
catgctgaaacagtatgccgacaagcttgaatttatgcacattcttacccgggttaaccgaaaggtggcaacagaatttgagtccttttc
ctttgacgctacttttcatgcaaagaaacagattccatgtattgtttccatgctcacaaaagaactctatttttatcactaactcgagatcgat
aa
Amino acid sequence:
mdfqvqifsfllisasvimsrgvdivltqspaslavslgqratiscrasesveyyvtslmqwyqqkpgqppkllisaasnvesgvp
arfsgsgsgtdfslnihpveeddiamyfcqqsrkvpwtfgggtkleikrggggsggggsggggsqvqlkesgpglvapsqslsit
ctvsgfsltgygvnwvrqppgkglewlgmiwgdgstdynsalksrlsitkdnsksqvflkmnslqtddtaryycardgysnfh
yyvmdywgqgtsvtvssdlepkssdkthtsppspapellggssvflfppkpkdtlmisrtpevtcvvvdvshedpevkfnwy
vdgvevhnaktkpreeqynstyrvvsvltvlhqdwlngkeykckvsnkalpapiektiskakgqprepqvytlppsrdeltkn
qvsltclvkgfypsdiavewesngqpennykttppvldsdgsfflyskltvdksrwqqgnvfscsvmhealhnhytqkslslsp
gkadpsnmentensvdsksiknlepkiihgsesmdsgisldnsykmdypemglciiinnknfhkstgmtsrsgtdvdaanlre
tfrnlkyevrnkndltreeivelmrdvskedhskrssfvcvllshgeegiifgtngpvdlkkitnffrgdrcrsltgkpklfiiqacrgt
eldcgietdsgvdddmachkipveadflyaystapgyyswrnskdgswfiqslcamlkqyadklefmhiltrvnrkvatefesf
sfdatfhakkqipcivsmltkelyfyh
124. hcasp8-TM/CT
hCaspase8B:
Nucleotide sequence:
ggatccttcgaacatggacttcagcagaaatctttatgatattggggaacaactggacagtgaagatctggcctccctcaagttcctga
gcctggactacattccgcaaaggaagcaagaacccatcaaggatgccttgatgttattccagagactccaggaaaagagaatgttgg
aggaaagcaatctgtccttcctgaaggagctgctcttccgaattaatagactggatttgctgattacctacctaaacactagaaaggag
gagatggaaagggaacttcagacaccaggcagggctcaaatttctgcctacagggtcatgctctatcagatttcagaagaagtgagc
agatcagaattgaggtcttttaagtttcttttgcaagaggaaatctccaaatgcaaactggatgatgacatgaacctgctggatattttcat
agagatggagaagagggtcatcctgggagaaggaaagttggacatcctgaaaagagtctgtgcccaaatcaacaagagcctgctg
aagataatcaacgactatgaagaattcagcaaagagagaagcagcagccttgaaggaagtcctgatgaattttcaaatggggagga
gttgtgtggggtaatgacaatctcggactctccaagagaacaggatagtgaatcacagactttggacaaagtttaccaaatgaaaagc
aaacctcggggatactgtctgatcatcaacaatcacaattttgcaaaagcacgggagaaagtgcccaaacttcacagcattagggac
aggaatggaacacacttggatgcaggggctttgaccacgacctttgaagagcttcattttgagatcaagccccacgatgactgcacag
tagagcaaatctatgagattttgaaaatctaccaactcatggaccacagtaacatggactgcttcatctgctgtatcctctcccatggaga
caagggcatcatctatggcactgatggacaggaggcccccatctatgagctgacatctcagttcactggtttgaagtgcccttcccttg
ctggaaaacccaaagtgttttttattcaggcttgtcagggggataactaccagaaaggtatacctgttgagactgattcagaggagcaa
ccctatttagaaatggatttatcatcacctcaaacgagatatatcccggatgaggctgactttctgctggggatggccactgtgaataact
gtgtttcctaccgaaaccctgcagagggaacctggtacatccagtcactttgccagagcctgagagagcgatgtcctcgaggcgatg
atattctcaccatcctgactgaagtgaactatgaagtaagcaacaaggatgacaagaaaaacatggggaaacagatgcctcagccta
ctttcacactaagaaaaaaacttgtcttcccttctgattgagcatgcatcgata
Amino acid sequence:
Dpsnmdfsrnlydigeqldsedlaslkflsldyipqrkqepikdalmlfqrlqekrmleesnlsflkellfrinrldllitylntrkee
merelqtpgraqisayrvmlyqiseevsrselrsfkfllqeeiskckldddmnlldifiemekrvilgegkldilkrvcaqinksllk
iindyeefskerssslegspdefsngeelcgvmtisdspreqdsesqtldkvyqmkskprgycliinnhnfakarekvpklhsir
drnthldagaltttfeelhfeikphddctveqiyeilkiyqlmdhsnmdcficcilshgdkgiiygtdgqeapiyeltsqftglkcp
slagkpkvffiqacqgdnyqkgipvetdseeqpylemdlsspqtryipdeadfllgmatvnncvsyrnpaegtwyiqslcqslr
ercprgddiltiltevnyevsnkddkknmgkqmpqptftlrkklvfpsd
hCaspase8C:
Nucleotide sequence:
ggatccttcgaacatggacttcagcagaaatctttatgatattggggaacaactggacagtgaagatctggcctccctcaagttcctga
gcctggactacattccgcaaaggaagcaagaacccatcaaggatgccttgatgttattccagagactccaggaaaagagaatgttgg
aggaaagcaatctgtccttcctgaaggagctgctcttccgaattaatagactggatttgctgattacctacctaaacactagaaaggag
gagatggaaagggaacttcagacaccaggcagggctcaaatttctgcctacagggtcatgctctatcagatttcagaagaagtgagc
agatcagaattgagtcttttaagtttcttttgcaagaggaaatctccaaatgcaaactggatgatgacatgaacctgctggatattttcat
agagatggagaagagggtcatcctgggagaaggaaagttggacatcctgaaaagagtctgtgcccaaatcaacaagagcctgctg
aagataatcaacgactatgaagaattcagcaaaggggaggagttgtgtggggtaatgacaatctcggactctccaagagaacaggat
agtgaatcacagactttggacaaagtttaccaaatgaaaagcaaacctcggggatactgtctgatcatcaacaatcacaattttgcaaa
agcacgggagaaagtgcccaaacttcacagcattagggacaggaatggaacacacttggatgcaggggctttgaccacgacctttg
aagagcttcattttgagatcaagccccacgatgactgcacagtagagcaaatctatgagattttgaaaatctaccaactcatggaccac
agtaacatggactgcttcatctgctgtatcctctcccatggagacaagggcatcatctatggcactgatggacaggaggcccccatcta
tgagctgacatctcagttcactggtttgaagtgcccttcccttgctggaaaacccaaagtgttttttattcaggcttgtcagggggataact
accagaaaggtatacctgttgagactgattcagaggagcaaccctatttagaaatggatttatcatcacctcaaacgagatatatcccg
gatgaggctgactttctgctggggatggccactgtgaataactgtgtttcctaccgaaaccctgcagagggaacctggtacatccagt
cactttgccagagcctgagagagcgatgtcctcgaggcgatgatattctcaccatcctgactgaagtgaactatgaagtaagcaacaa
ggatgacaagaaaaacatggggaaacagatgcctcagcctactttcacactaagaaaaaaacttgtcttcccttctgattgagcatgca
tcgata
Amino acid sequence:
dpsnmdfsrnlydigeqldsedlaslkflsldyipqrkqepikdalmlfqrlqekrmleesnlsflkellfrinrldllitylntrkeem
erelqtpgraqisayrvmlyqiseevsrselrsfkfllqeeiskckldddmnlldifiemekrvilgegkldilkrvcaqinksllkii
ndyeefskgeelcgvmtisdspreqdsesqtldkvyqmkskprgycliinnhnfakarekvpklhsirdrngthldagaltttfee
lhfeikphddctveqiyeilkiyqlmdhsnmdcficcilshgdkgiiygtdgqeapiyeltsqftglkcpslagkpkvffiqacqg
dnyqkgipvetdseeqpylemdlsspqtryipdeadfllgmatvnncvsyrnpaegtwyiqslcqslrercprgddiltiltevny
evsnkddkknmgkqmpqptftlrkklvfpsd
125. 2e12 scFv hIgG1 (SSS-P)H WCH2 WCH3-hcasp8-TM/CT
Nucleotide sequence:
aagcttatggattttcaagtgcagattttcagcttcctgctaatcagtgcttcagtcataatgtccagaggagtcgacattgtgctcaccca
atctccagcttctttggctgtgtctctaggtcagagagccaccatctcctgcagagccagtgaaagtgttgaatattatgtcacaagttta
atgcagtggtaccaacagaaaccaggacagccacccaaactcctcatctctgctgcatccaacgtagaatctggggtccctgccagg
tttagtggcagtgggtctgggacagacttcagcctcaacatccatcctgtggaggaggatgatattgcaatgtatttctgtcagcaaagt
aggaaggttccttggacgttcggtggaggcaccaagctggaaatcaaacggggtggcggtggctcgggcggaggtgggtcgggt
ggcggcggatctcaggtgcagctgaaggagtcaggacctggcctggtggcgccctcacagagcctgtccatcacatgcaccgtct
cagggttctcattaaccggctatggtgtaaactgggttcgccagcctccaggaaagggtctggagtggctgggaatgatatggggtg
atggaagcacagactataattcagctctcaaatccagactgagcatcaccaaggacaactccaagagccaagttttcttaaaaatgaa
cagtctgcaaactgatgacacagccagatactactgtgccagagatggttatagtaactttcattactatgttatggactactggggtcaa
ggaacctcagtcaccgtctcctcagatctggagcccaaatcttctgacaaaactcacacatccccaccgtccccagcacctgaactcc
tgggtggaccgtcagtcttcctcttccccccaaaacccaaggacaccctcatgatctcccggacccctgaggtcacatgcgtggtggt
ggacgtgagccacgaagaccctgaggtcaagttcaactggtacgtggacggcgtggaggtgcataatgccaagacaaagccgcg
ggaggagcagtacaacagcacgtaccgtgtggtcagcgtcctcaccgtcctgcaccaggactggctgaatggcaaggagtacaag
tgcaaggtctccaacaaagccctcccagcccccatcgagaaaaccatctccaaagccaaagggcagccccgagaaccacaggtgt
acaccctgcccccatcccgggatgagctgaccaagaaccaggtcagcctgacctgcctggtcaaaggcttctatcccagcgacatc
gccgtggagtgggagagcaatgggcagccggagaacaactacaagaccacgcctcccgtgctggactccgacggctccttcttcc
tctacagcaagctcaccgtggacaagagcaggtggcagcaggggaacgtcttctcatgctccgtgatgcatgaggctctgcacaac
cactacacgcagaagagcctctccctgtctccgggtaaagcggatccttcgaacatggacttcagcagaaatctttatgatattgggga
acaactggacagtgaagatctggcctccctcaagttcctgagcctggactacattccgcaaaggaagcaagaacccatcaaggatg
ccttgatgttattccagagactccaggaaaagagaatgttggaggaaagcaatctgtccttcctgaaggagctgctcttccgaattaata
gactggatttgctgattacctacctaaacactagaaaggaggagatggaaagggaacttcagacaccaggcagggctcaaatttctg
cctacagggtcatgctctatcagatttcagaagaagtgagcagatcagaattgaggtcttttaagtttcttttgcaagaggaaatctccaa
atgcaaactggatgatgacatgaacctgctggatattttcatagagatggagaagagggtcatcctgggagaaggaaagttggacat
cctgaaaagagtctgtgcccaaatcaacaagagcctgctgaagataatcaacgactatgaagaattcagcaaagagagaagcagca
gccttgaaggaagtcctgatgaattttcaaatggggaggagttgtgtggggtaatgacaatctcggactctccaagagaacaggatag
tgaatcacagactttggacaaagtttaccaaatgaaaagcaaacctcggggatactgtctgatcatcaacaatcacaattttgcaaaag
cacgggagaaagtgcccaaacttcacagcattagggacaggaatggaacacacttggatgcaggggctttgaccacgacctttgaa
gagcttcattttgagatcaagccccacgatgactgcacagtagagcaaatctatgagattttgaaaatctaccaactcatggaccacag
taacatggactgcttcatctgctgtatcctctcccatggagacaagggcatcatctatggcactgatggacaggaggcccccatctatg
agctgacatctcagttcactggtttgaagtgcccttcccttgctggaaaacccaaagtgttttttattcaggcttgtcagggggataactac
cagaaaggtatacctgttgagactgattcagaggagcaaccctatttagaaatggatttatcatcacctcaaacgagatatatcccggat
gaggctgactttctgctggggatggccactgtgaataactgtgtttcctaccgaaaccctgcagagggaacctggtacatccagtcact
ttgccagagcctgagagagcgatgtcctcgaggcgatgatattctcaccatcctgactgaagtgaactatgaagtaagcaacaaggat
gacaagaaaaacatggggaaacagatgcctcagcctactttcacactaagaaaaaaacttgtcttcccttctgattgagcatgcatcga
ta
Amino acid sequence:
[sequence omitted]
126. 2e12 scFv hIgG1 (SSS-P)H P238SCH2 WCH3-hcasp8B-TM/CT
(other caspase 8 isoforms are similar)
Nucleotide sequence:
aagcttatggattttcaagtgcagattttcagcttcctgctaatcagtgcttcagtcataatgtccagaggagtcgacattgtgctcaccca
atctccagcttctttggctgtgtctctaggtcagagagccaccatctcctgcagagccagtgaaagtgttgaatattatgtcacaagttta
atgcagtggtaccaacagaaaccaggacagccacccaaactcctcatctctgctgcatccaacgtagaatctggggtccctgccagg
tttagtggcagtgggtctgggacagacttcagcctcaacatccatcctgtggaggaggatgatattgcaatgtatttctgtcagcaaagt
aggaaggttccttggacgttcggtggaggcaccaagctggaaatcaaacggggtggcggtggctcgggcggaggtgggtcgggt
ggcggcggatctcaggtgcagctgaaggagtcaggacctggcctggtggcgccctcacagagcctgtccatcacatgcaccgtct
cagggttctcattaaccggctatggtgtaaactgggttcgccagcctccaggaaagggtctggagtggctgggaatgatatggggtg
atggaagcacagactataattcagctctcaaatccagactgagcatcaccaaggacaactccaagagccaagttttcttaaaaatgaa
cagtctgcaaactgatgacacagccagatactactgtgccagagatggttatagtaactttcattactatgttatggactactggggtcaa
ggaacctcagtcaccgtctcctcagatctggagcccaaatcttctgacaaaactcacacatccccaccgtccccagcacctgaactcc
tgggtggatcgcagtcttcctcttccccccaaaacccaaggacaccctcatgatctcccggacccctgaggtcacatgcgtggtggt
ggacgtgagccacgaagaccctgaggtcaagttcaactggtacgtggacggcgtggaggtgcataatgccaagacaaagccgcg
ggaggagcagtacaacagcacgtaccgtgtggtcagcgtcctcaccgtcctgcaccaggactggctgaatggcaaggagtacaag
tgcaaggtctccaacaaagccctcccagcccccatcgagaaaaccatctccaaagccaaagggcagccccgagaaccacaggtgt
acaccctgcccccatcccgggatgagctgaccaagaaccaggtcagcctgacctgcctggtcaaaggcttctatcccagcgacatc
gccgtggagtgggagagcaatgggcagccggagaacaactacaagaccacgcctcccgtgctggactccgacggctccttcttcc
tctacagcaagctcaccgtggacaagagcaggtggcagcaggggaacgtcttctcatgctccgtgatgcatgaggctctgcacaac
cactacacgcagaagagcctctccctgtctccgggtaaagcggatccttcgaacatggacttcagcagaaatctttatgatattgggga
acaactggacagtgaagatctggcctccctcaagttcctgagcctggactacattccgcaaaggaagcaagaacccatcaaggatg
ccttgatgttattccagagactccaggaaaagagaatgttggaggaaagcaatctgtccttcctgaaggagctgctcttccgaattaata
gactggatttgctgattacctacctaaacactagaaaggaggagatggaaagggaacttcagacaccaggcagggctcaaatttctg
cctacagggtcatgctctatcagatttcagaagaagtgagcagatcagaattgaggtcttttaagtttcttttgcaagaggaaatctccaa
atgcaaactggatgatgacatgaacctgctggatattttcatagagatggagaagagggtcatcctgggagaaggaaagttggacat
cctgaaaagagtctgtgcccaaatcaacaagagcctgctgaagataatcaacgactatgaagaattcagcaaagagagaagcagca
gccttgaaggaagtcctgatgaattttcaaatggggaggagttgtgtggggtaatgacaatctcggactctccaagagaacaggatag
tgaatcacagactttggacaaagtttaccaaatgaaaagcaaacctcggggatactgtctgatcatcaacaatcacaattttgcaaaag
cacgggagaaagtgcccaaacttcacagcattagggacaggaatggaacacacttggatgcaggggctttgaccacgacctttgaa
gagcttcattttgagatcaagccccacgatgactgcacagtagagcaaatctatgagattttgaaaatctaccaactcatggaccacag
taacatggactgcttcatctgctgtatcctctcccatggagacaagggcatcatctatggcactgatggacaggaggcccccatctatg
agctgacatctcagttcactggtttgaagtgcccttcccttgctggaaaacccaaagtgttttttattcaggcttgtcagggggataactac
cagaaaggtatacctgttgagactgattcagaggagcaaccctatttagaaatggatttatcatcacctcaaacgagatatatcccggat
gaggctgactttctgctggggatggccactgtgaataactgtgtttcctaccgaaaccctgcagagggaacctggtacatccagtcact
ttgccagagcctgagagagcgatgtcctcgaggcgatgatattctcaccatcctgactgaagtgaactatgaagtaagcaacaaggat
gacaagaaaaacatggggaaacagatgcctcagcctactttcacactaagaaaaaaacttgtcttcccttctgattgagcatgcatcga
taa
Amino acid sequence:
mdfqvqifsfllisasvimsrgvdivltqspaslavslgqratiscrasesveyyvtslmqwyqqkpgqppkilisaasnvesgvp
arfsgsgsgtdfslnihpveeddiamyfcqqsrkvpwtfgggtkleikrggggsggggsggggsqvqlkesgpglvapsqslsit
ctvsgfsltgygvnwvrqppgkglewlgmiwgdgstdynsalksrlsitkdnsksqvflkmnslqtddtaryycardgysnfh
yyvmdywgqgtsvtvssdlepkssdkthtsppspapellggssvflfppkpkdtlmisrtpevtcvvvdvshedpevkfnwy
vdgvevhnaktkpreeqynstyrvvsvltvlhqdwlngkeykckvsnkalpapiektiskakgqprepqvytlppsrdeltkn
qvsltclvkgfypsdiavewesngqpennykttppvldsdgsfflyskltvdksrwqqgnvfscsvmhealhnhytqkslslsp
gkadpsnmdfsrnlydigeqldsedlaslkflsldyipqrkqepikdalmlfqrlqekrmleesnlsflkellfrinrldllitylntrk
eemerelqtpgraqisayrvmlyqiseevsrselrsfkfllqeeiskckldddmnlldifiemekrvilgegkldilkrvcaqinksl
lkiindyeefskerssslegspdefsngeelcgvmtisdspreqdsesqtldkvyqmkskprgycliinnhnfakarekvpklhsi
rdrngthldagaltttfeelhfeikphddctveqiyeilkiyqlmdhsnmdcficcilshgdkgiiygtdgqeapiyeltsqftglkc
pslagkpkvffiqacqgdnyqkgipvetdseeqpylemdlsspqtryipdeadfllgmatvnncvsyrnpaegtwyiqslcqsl
rercprgddiltiltevnyevsnkddkknmgkqmpqptftlrkklvfpsd
127. hFADD-TM/CT
Nucleotide sequence:
Gttgtggatccttcgaacccgttcctggtgctgctgcactcggtgtcgtccagcctgtcgagcagcgagctgaccgagctcaagttcc
tatgcctcgggcgcgtgggcaagcgcaagctggagcgcgtgcagagcggcctagacctcttctccatgctgctggagcagaacga
cctggagcccgggcacaccgagctcctgcgcgagctgctcgcctccctgcggcgccacgacctgctgcggcgcgtcgacgactt
cgaggcgggggcggcggccggggccgcgcctggggaagaagacctgtgtgcagcatttaacgtcatatgtgataatgtggggaa
agattggagaaggctggctcgtcagctcaaagtctcagacaccaagatcgacagcatcgaggacagatacccccgcaacctgaca
gagcgtgtgcgggagtcactgagaatctggaagaacacagagaaggagaacgcaacagtggcccacctggtgggggctctcag
gtcctgccagatgaacctggtggctgacctggtacaagaggttcagcaggcccgtgacctccagaacaggagtggggccatgtcc
ccgatgtcatggaactcagacgcatctacctccgaagcgtcctgataactcgagatcgataacaac
Amino acid sequence:
Dpsnpflvllhsvssslssseltelkflclgrvgkrklervqsgldlfsmlleqndlepghtellrellaslrrhdllrrvddfeagaaag
aapgeedlcaafnvicdnvgkdwrrlarqlkvsdtkidsiedryprnltervreslriwkntekenatvahlvgalrscqmnlvad
lvqevqqardlqnrsgamspmswnsdastseas
128. 2e12 scFv-hIgG1 (SSS-P)H WCH2 WCH3-hFADD-TM/CT
Nucleotide sequence:
aagcttatggattttcaagtgcagattttcagcttcctgctaatcagtgcttcagtcataatgtccagaggagtcgacattgtgctcaccca
atctccagcttctttggctgtgtctctaggtcagagagccaccatctcctgcagagccagtgaaagtgttgaatattatgtcacaagttta
atgcagtggtaccaacagaaaccaggacagccacccaaactcctcatctctgctgcatccaacgtagaatctggggtccctgccagg
tttagtggcagtgggtctgggacagacttcagcctcaacatccatcctgtggaggaggatgatattgcaatgtatttctgtcagcaaagt
aggaaggttccttggacgttcggtggaggcaccaagctggaaatcaaacggggtggcggtggctcgggcggaggtgggtcgggt
ggcggcggatctcaggtgcagctgaaggagtcaggacctggcctggtggcgccctcacagagcctgtccatcacatgcaccgtct
cagggttctcattaaccggctatggtgtaaactgggttcgccagcctccaggaaagggtctggagtggctgggaatgatatggggtg
atggaagcacagactataattcagctctcaaatccagactgagcatcaccaaggacaactccaagagccaagttttcttaaaaatgaa
cagtctgcaaactgatgacacagccagatactactgtgccagagatggttatagtaactttcattactatgttatggactactggggtcaa
ggaacctcagtcaccgtctcctcagatctggagcccaaatcttctgacaaaactcacacatccccaccgtccccagcacctgaactcc
tgggtggaccgtcagtcttcctcttccccccaaaacccaaggacaccctcatgatctcccggacccctgaggtcacatgcgtggtggt
ggacgtgagccacgaagaccctgaggtcaagttcaactggtacgtggacggcgtggaggtgcataatgccaagacaaagccgcg
ggaggagcagtacaacagcacgtaccgtgtggtcagcgtcctcaccgtcctgcaccaggactggctgaatggcaaggagtacaag
tgcaaggtctccaacaaagccctcccagcccccatcgagaaaaccatctccaaagccaaagggcagccccgagaaccacaggtgt
acaccctgcccccatcccgggatgagctgaccaagaaccaggtcagcctgacctgcctggtcaaaggcttctatcccagcgacatc
gccgtggagtgggagagcaatgggcagccggagaacaactacaagaccacgcctcccgtgctggactccgacggctccttcttcc
tctacagcaagctcaccgtggacaagagcaggtggcagcaggggaacgtcttctcatgctccgtgatgcatgaggctctgcacaac
cactacacgcagaagagcctctccctgtctccgggtaaagcggatccttcgaacccgttcctggtgctgctgcactcggtgtcgtcca
gcctgtcgagcagcgagctgaccgagctcaagttcctatgcctcgggcgcgtgggcaagcgcaagctggagcgcgtgcagagcg
gcctagacctcttctccatgctgctggagcagaacgacctggagcccgggcacaccgagctcctgcgcgagctgctcgcctccctg
cggcgccacgacctgctgcggcgcgtcgacgacttcgaggcgggggcggcggccggggccgcgcctggggaagaagacctgt
gtgcagcatttaacgtcatatgtgataatgtggggaaagattggagaaggctggctcgtcagctcaaagtctcagacaccaagatcga
cagcatcgaggacagatacccccgcaacctgacagagcgtgtgcgggagtcactgagaatctggaagaacacagagaaggaga
acgcaacagtggcccacctggtgggggctctcaggtcctgccagatgaacctggtggctgacctggtacaagaggttcagcaggc
ccgtgacctccagaacaggagtggggccatgtccccgatgtcatggaactcagacgcatctacctccgaagcgtcctgataactcga
gatcgataacaac
Amino acid sequence:
mdfqvqifsfllisasvimsrgvdivltqspaslavslgqratiscrasesveyyvtslmqwyqqkpgqppkllisaasnvesgvp
arfsgsgsgtdfslnihpveeddiamyfcqqsrkvpwtfgggtkleikrggggsggggsggggsqvqlkesgpglvapsqslsit
ctvsgfsltgygvnwvrqppgkglewlgmiwgdgstdynsalksrlsitkdnsksqvflkmnslqtddtaryycardgysnfh
yyvmdywgqgtsvtvssdlepkssdkthtsppspapellggpsvflfppkpkdtlmisrtpevtcvvvdvshedpevkfnwy
vdgvevhnaktkpreeqynstyrvvsvltvlhqdwlngkeykckvsnkalpapiektiskakgqprepqvytlppsrdeltkn
qvsltclvkgfypsdiavewesngqpennykttppvldsdgsfflyskltvdksrwqqgnvfscsvmhealhnhytqkslslsp
gkadpsnpflvllhsvssslssseltelkflclgrvgkrklervqsgldlfsmlleqndlepghtellrellaslrrhdllrrvddfeagaa
agaapgeedlcaafnvicdnvgkdwrrlarqlkvsdtkidsiedryprnltervreslriwkntekenatvahlvgalrscqmnlv
adlvqevqqardlqnrsgamspmswnsdastseas
129. 2e12 scFv-hIgG1 (SSS-P)H P238SCH2 WCH3-hFADD-TM/CT
Nucleotide sequence:
aagcttatggattttcaagtgcagattttcagcttcctgctaatcagtgcttcagtcataatgtccagaggagtcgacattgtgctcaccca
atctccagctctttggctgtgtctctaggtcagagagccaccatctcctgcagagccagtgaaagtgttgaatattatgtcacaagttta
atgcagtggtaccaacagaaaccaggacagccacccaaactcctcatctctgctgcatccaacgtagaatctggggtccctgccagg
tttagtggcagtgggtctgggacagacttcagcctcaacatccatcctgtggaggaggatgatattgcaatgtatttctgtcagcaaagt
aggaaggttccttggacgttcggtggaggcaccaagctggaaatcaaacggggtggcggtggctcgggcggaggtgggtcgggt
ggcggcggatctcaggtgcagctgaaggagtcaggacctggcctggtggcgccctcacagagcctgtccatcacatgcaccgtct
cagggttctcattaaccggctatggtgtaaactgggttcgccagcctccaggaaagggtctggagtggctgggaatgatatggggtg
atggaagcacagactataattcagctctcaaatccagactgagcatcaccaaggacaactccaagagccaagttttcttaaaaatgaa
cagtctgcaaactgatgacacagccagatactactgtgccagagatggttatagtaactttcattactatgttatggactactggggtcaa
ggaacctcagtcaccgtctcctcagatctggagcccaaatcttctgacaaaactcacacatccccaccgtccccagcacctgaactcc
tgggtggatcgtcagtcttcctcttccccccaaaacccaaggacaccctcatgatctcccggacccctgaggtcacatgcgtggtggt
ggacgtgagccacgaagaccctgaggtcaagttcaactggtacgtggacggcgtggaggtgcataatgccaagacaaagccgcg
ggaggagcagtacaacagcacgtaccgtgtggtcagcgtcctcaccgtcctgcaccaggactggctgaatggcaaggagtacaag
tgcaaggtctccaacaaagccctcccagcccccatcgagaaaaccatctccaaagccaaagggcagccccgagaaccacaggtgt
acaccctgcccccatcccgggatgagctgaccaagaaccaggtcagcctgacctgcctggtcaaaggcttctatcccagcgacatc
gccgtggagtgggagagcaatgggcagccggagaacaactacaagaccacgcctcccgtgctggactccgacggctccttcttcc
tctacagcaagctcaccgtggacaagagcaggtggcagcaggggaacgtcttctcatgctccgtgatgcatgaggctctgcacaac
cactacacgcagaagagcctctccctgtctccgggtaaagcggatccttcgaacccgttcctggtgctgctgcactcggtgtcgtcca
gcctgtcgagcagcgagctgaccgagctcaagttcctatgcctcgggcgcgtgggcaagcgcaagctggagcgcgtgcagagcg
gcctagacctcttctccatgctgctggagcagaacgacctggagcccgggcacaccgagctcctgcgcgagctgctcgcctccctg
cggcgccacgacctgctgcggcgcgtcgacgacttcgaggcgggggcggcggccggggccgcgcctggggaagaagacctgt
gtgcagcatttaacgtcatatgtgataatgtggggaaagattggagaaggctggctcgtcagctcaaagtctcagacaccaagatcga
cagcatcgaggacagatacccccgcaacctgacagagcgtgtgcgggagtcactgagaatctggaagaacacagagaaggaga
acgcaacagtggcccacctggtgggggctctcaggtcctgccagatgaacctggtggctgacctggtacaagaggttcagcaggc
ccgtgacctccagaacaggagtggggccatgtccccgatgtcatggaactcagacgcatctacctccgaagcgtcctgataactcga
gatcgataacaac
Amino acid sequence:
mdfqvqifsfllisasvimsrgvdivltqspaslavslgqratiscrasesveyyvtslmqwyqqkpgqppkllisaasnvesgvp
arfsgsgsgtdfslnihpveeddiamyfcqqsrkvpwtfgggtkleikrggggsggggsggggsqvqlkesgpglvapsqslsit
ctvsgfsltgygvnwvrqppgkglewlgmiwgdgstdynsalksrlsitkdnsksqvflkmnslqtddtaryycardgysnfh
yyvmdywgqgtsvtvssdlepkssdkthtsppspapellggssvflfppkpkdtlmisrtpevtcvvvdvshedpevkfnwy
vdgvevhnaktkpreeqynstyrvvsvltvlhqdwlngkeykckvsnkalpapiektiskakgqprepqvytlppsrdeltkn
qvsltclvkgfypsdiavewesngqpennykttppvldsdgsfflyskltvdksrwqqgnvfscsvmhealhnhytqkslslsp
gkadpsnpflvllhsvssslssseltelkflclgrvgkrklervqsgldlfsmlleqndlepghtellrellaslrrhdllrrvddfeagaa
agaapgeedlcaafnvicdnvgkdwrrlarqlkvsdtkidsiedryprnltervreslriwkntekenatvahlvgalrscqmnlv
adlvqevqqardlqnrsgamspmswnsdastseas
130. 1D8 scFv hIgG1 (SSS-P)H P238S CH2 WCH3-hCD80TMCT
Nucleotide sequence
aagcttatggattttcaagtgcagattttcagcttcctgctaatcagtgcttcagtcataatgtccagaggagtcgacattgtgctcactca
gtctccaacaaccatagctgcatctccaggggagaaggtcaccatcacctgccgtgccagctccagtgtaagttacatgtactggtac
cagcagaagtcaggcgcctcccctaaactctggatttatgacacatccaagctggcttctggagttccaaatcgcttcagtggcagtg
ggtctgggacctcttattctctcgcaatcaacaccatggagactgaagatgctgccacttattactgtcagcagtggagtagtactccgc
tcacgttcgggtctgggaccaagctggagatcaaacggggtggcggtggctcgggcggtggtgggtcgggtggcggcggatctc
aggtgcagctgaaggaggcaggacctggcctggtgcaaccgacacagaccctgtccctcacatgcactgtctctgggttctcattaa
ccagcgatggtgtacactggattcgacagcctccaggaaagggtctggaatggatgggaataatatattatgatggaggcacagatt
ataattcagcaattaaatccagactgagcatcagcagggacacctccaagagccaagttttcttaaaaatcaacagtctgcaaactgat
gacacagccatgtattactgtgccagaatccactttgattactggggccaaggagtcatggtcacagtctcctctgatctggagcccaa
atcttctgacaaaactcacacatccccaecgtccccagcacctgaactcctggggggatcgtcagtcttcctcttccccccaaaaccca
aggacaccctcatgatctcccggacccctgaggtcacatgcgtggtggtggacgtgagccacgaagaccctgaggtcaagttcaac
tggtacgtggacggcgtggaggtgcataatgccaagacaaagccgcgggaggagcagtacaacagcacgtaccgtgtggtcagc
gtcctcaccgtcctgcaccaggactggctgaatggcaaggagtacaagtgcaaggtctccaacaaagccctcccagcccccatcga
gaaaaccatctccaaagccaaagggcagccccgagaaccacaggtgtacaccctgcccccatcccgggatgagctgaccaagaa
ccaggtcagcctgacctgcctggtcaaaggcttctatcccagcgacatcgccgtggagtgggagagcaatgggcagccggagaac
aactacaagaccacgcctcccgtgctggactccgacggctccttcttcctctacagcaagctcaccgtggacaagagcaggtggca
gcaggggaacgtcttctcatgctccgtgatgcatgaggctctgcacaaccactacacgcagaagagcctctccctgtctccgggtaa
agcggatccttcgaacctgctcccatcctgggccattaccttaatctcagtaaatggaatttttgtgatatgctgcctgacctactgctttg
ccccaagatgcagagagagaaggaggaatgagagattgagaagggaaagtgtacgccctgtataaatcgat
Amino acid sequence:
mdfqvqifsfllisasvimsrgvdivltqspttiaaspgekvtitcrasssvsymywyqqksgaspklwiydtsklasgvpnrfsg
sgsgtsyslaintmetedaatyycqqwsstpltfgsgtkleikrggggsggggsggggsqvqlkeagpglvqptqtlsltctvsgfs
ltsdgvhwirqppgkglewmgiiyydggtdynsaiksrlsisrdtsksqvflkinslqtddtamyycarihfdywgqgvmvtv
ssdlepkssdkthtsppspapellggssvflfppkpkdtlmisrtpevtcvvvdvshedpevkfnwyvdgvevhnaktkpree
qynstyrvvsvltvlhqdwlngkeykckvsnkalpapiektiskakgqprepqvytlppsrdeltknqvsltclvkgfypsdiav
ewesngqpennykttppvldsdgsfflyskltvdksrwqqgnvfscsvmhealhnhytqkslslspgkadpsnllpswaitlis
vngifviccltycfaprcrerrrnerlrresvrpv
131.1D8 scFv hIgG1 (SSS-P)H WCH2 WCH3-hCD80TM/CT
Nucleotide sequence
aagcttatggattttcaagtgcagattttcagcttcctgctaatcagtgcttcagtcataatgtccagaggagtcgacattgtgctcaccca
atctccagcttctttggctgtgtctctaggtcagagagccaccatctcctgcagagccagtgaaagtgttgaatattatgtcacaagttta
atgcagtggtaccaacagaaaccaggacagccacccaaactcctcatctctgctgcatccaacgtagaatctggggtccctgccagg
tttagtggcagtgggtctgggacagacttcagcctcaacatccatcctgtggaggaggatgatattgcaatgtatttctgtcagcaaagt
aagcttatggattttcaagtgcagattttcagcttcctgctaatcagtgcttcagtcataatgtccagaggagtcgacattgtgctcactca
gtctccaacaaccatagctgcatctccaggggagaaggtcaccatcacctgccgtgccagctccagtgtaagttacatgtactggtac
cagcagaagtcaggcgcctcccctaaactctggatttatgacacatccaagctggcttctggagttccaaatcgcttcagtggcagtg
ggtctgggacctcttattctctcgcaatcaacaccatggagactgaagatgctgccacttattactgtcagcagtggagtagtactccgc
tcacgttcgggtctgggaccaagctggagatcaaacggggtggcggtggctcgggcggtggtgggtcgggtggcggcggatctc
aggtgcagctgaaggaggcaggacctggcctggtgcaaccgacacagaccctgtccctcacatgcactgtctctgggttctcattaa
ccagcgatggtgtacactggattcgacagcctccaggaaagggtctggaatggatgggaataatatattatgatggaggcacagatt
ataattcagcaattaaatccagactgagcatcagcagggacacctccaagagccaagttttcttaaaaatcaacagtctgcaaactgat
gacacagccatgtattactgtgccagaatccactttgattactggggccaaggagtcatggtcacagtctcctctgatctggagcccaa
atcttctgacaaaactcacacatccccaccgtccccagcacctgaactcctggggggaccgtcagtcttcctcttccccccaaaaccc
aaggacaccctcatgatctcccggacccctgaggtcacatgcgtggtggtggacgtgagccacgaagaccctgaggtcaagttcaa
ctggtacgtggacggcgtggaggtgcataatgccaagacaaagccgcgggaggagcagtacaacagcacgtaccgtgtggtcag
cgtcctcaccgtcctgcaccaggactggctgaatggcaaggagtacaagtgcaaggtctccaacaaagccctcccagcccccatcg
agaaaaccatctccaaagccaaagggcagccccgagaaccacaggtgtacaccctgcccccatcccgggatgagctgaccaaga
accaggtcagcctgacctgcctggtcaaaggcttctatcccagcgacatcgccgtggagtgggagagcaatgggcagccggagaa
caactacaagaccacgcctcccgtgctggactccgacggctccttcttcctctacagcaagctcaccgtggacaagagcaggtggc
agcaggggaacgtcttctcatgctccgtgatgcatgaggctctgcacaaccactacacgcagaagagcctctccctgtctccgggta
aagcggatccttcgaacctgctcccatcctgggccattaccttaatctcagtaaatggaatttttgtgatatgctgcctgacctactgcttt
gccccaagatgcagagagagaaggaggaatgagagattgagaagggaaagtgtacgccctgtataaatcgat
Amino acid sequence:
mdfqvqifsfllisasvimsrgvdivltqspaslavslgqratiscrasesveyyvtslmqwyqqkpgqppkllisaasnvesgvp
arfsgsgsgtdfslnihpveeddiamyfcqqsklmdfqvqifsfllisasvimsrgvdivltqspttiaaspgekvtitcrasssvsy
mywyqqksgaspklwiydtsklasgvpnrfsgsgsgtsyslaintmetedaatyycqqwsstpltfgsgtkleikrggggsggg
gsggggsqvqlkeagpglvqptqtlsltctvsgfsltsdgvhwirqppgkglewmgiiyydggtdynsaiksrlsisrdtsksqvf
lkinslqtddtamyycarihfdywgqgvmvtvssdlepkssdkthtsppspapellggpsvflfppkpkdtlmisrtpevtcvv
vdvshedpevkfnwyvdgvevhnaktkpreeqynstyrvvsvltvlhqdwlngkeykckvsnkalpapiektiskakgqpr
epqvytlppsrdeltknqvsltclvkgfypsdiavewesngqpennykttppvldsdgsfflyskltvdksrwqqgnvfscsvm
healhnhytqkslslspgkadpsnllpswaitlisvngifviccltycfaprcrerrrnerlrresvrpv
132.1D8 scFv mIgAT4-hCD80TM/CT
Nucleotide sequence
aagcttatggattttcaagtgcagattttcagcttcctgctaatcagtgcttcagtcataatgtccagaggagtcgacattgtgctcactca
gtctccaacaaccatagctgcatctccaggggagaaggtcaccatcacctgccgtgccagctccagtgtaagttacatgtactggtac
cagcagaagtcaggcgcctcccctaaaetctggatttatgacacatccaagctggcttctggagttccaaatcgcttcagtggcagtg
ggtctgggacctcttattctctcgcaatcaacaccatggagactgaagatgctgccacttattactgtcagcagtggagtagtactccgc
tcacgttcgggtctgggaccaagctggagatcaaacggggtggcggtggctcgggcggtggtgggtcgggtggcggcggatctc
aggtgcagctgaaggaggcaggacctggcctggtgcaaccgacacagaccctgtccctcacatgcactgtctctgggttctcattaa
ccagcgatggtgtacactggattcgacagcctccaggaaagggtctggaatggatgggaataatatattatgatggaggcacagatt
ataattcagcaattaaatccagactgagcatcagcagggacacctccaagagccaagttttcttaaaaatcaacagtctgcaaactgat
gacacagccatgtattactgtgccagaatccactttgattactggggccaaggagtcatggtcacagtctcctctgatcacatctgttctc
ctcctactactcctcctccaccttcctgccagcccagcctgtcactgcagcggccagctcttgaggacctgctcctgggttcagatgcc
agcatcacatgtactctgaatggcctgagagatcctgagggagctgtcttcacctgggagccctccactgggaaggatgcagtgcag
aagaaagctgtgcagaattcctgcggctgctacagtgtgtccagcgtcctgcctggctgtgctgagcgctggaacagtggcgcatca
ttcaagtgcacagttacccatcctgagtctgacaccttaactggcacaattgccaaagtcacagtgaacaccttcccaccccaggtcca
cctgctaccgccgccgtcggaggagctggccctgaatgagctcgtgtccctgacatgcctggtgcgagctttcaaccctaaagaagt
gctggtgcgatggctgcatggaaatgaggagctgtccccagaaagctacctagtgtttgagcccctaaaggagccaggcgaggga
gccaccacctacctggtgacaagcgtgttgcgtgtatcagctgaaatctggaaacagggtgaccagtactcctgcatggtgggccac
gaggccttgcccatgaacttcacccagaagaccatcgaccgtctgtcgggtaaacccaccaatgtcagcgtgtctgtgatcatgtcag
agggagaggatccttcgaacaacctgctcccatcctgggccattaccttaatctcagtaaatggaatttttgtgatatgctgcctgaccta
ctgctttgccccaagatgcagagagagaaggaggaatgagagattgagaagggaaagtgtacgccctgtataaatcgatact
Amino acid sequence:
mdfqvqifsfllisasvimsrgvdivltqspttiaaspgekvtitcrasssvsymywyqqksgaspklwiydtsklasgvpnrfsg
sgsgtsyslaintmetedaatyycqqwsstpltfgsgtkleikrggggsggggsggggsqvqlkeagpglvqptqtlsltctvsgfs
ltsdgvhwirqppgkglewmgiiyydggtdynsaiksrlsisrdtsksqvflkinslqtddtamyycarihfdywgqgvmvtv
ssdhicsppttppppscqpslslqrpaledlllgsdasitctlnglrdpegavftwepstgkdavqkkavqnscgcysvssvlpgca
erwnsgasfkctvthpesdtltgtiakvtvntfppqvhllpppseelalnelvsltclvrafnpkevlvrwlhgneelspesylvfep
lkepgegattylvtsvlrvsaeiwkqgdqyscmvghealpmnftqktidrlsgkptnvsvsvimsegedpsnnllpswaitlisv
ngifviccltycfaprcrerrrnerlrresvrpv
133.1D8 scFv hIgE-hCD80-TM/CT
Nucleotide sequence
aagcttatggattttcaagtgcagattttcagcttcctgctaatcagtgcttcagtcataatgtccagaggagtcgacattgtgctcactca
gtctccaacaaccatagctgcatctccaggggagaaggtcaccatcacctgccgtgccagctccagtgtaagttacatgtactggtac
cagcagaagtcaggcgcctcccctaaactctggatttatgacacatccaagctggcttctggagttccaaatcgcttcagtggcagtg
ggtctgggacctcttattctctcgcaatcaacaccatggagactgaagatgctgccacttattactgtcagcagtggagtagtactccgc
tcacgttcgggtctgggaccaagctggagatcaaacggggtggcggtggctcgggcggtggtgggtcgggtggcggcggatctc
aggtgcagctgaaggaggcaggacctggcctggtgcaaccgacacagaccctgtccctcacatgcactgtctctgggttctcattaa
ccagcgatggtgtacactggattcgacagcctccaggaaagggtctggaatggatgggaataatatattatgatggaggcacagatt
ataattcagcaattaaatccagactgagcatcagcagggacacctccaagagccaagttttcttaaaaatcaacagtctgcaaactgat
gacacagccatgtattactgtgccagaatccactttgattactggggccaaggagtcatggtcacagtctcctctgatcacgtctgctcc
agggacttcaccccgcccaccgtgaagatcttacagtcgtcctgcgacggcggcgggcacttccccccgaccatccagctcctgtg
cctcgtctctgggtacaccccagggactatcaacatcacctggctggaggacgggcaggtcatggacgtggacttgtccaccgcctc
taccacgcaggagggtgagctggcctccacacaaagcgagctcaccctcagccagaagcactggctgtcagaccgcacctacac
ctgccaggtcacctatcaaggtcacacctttgaggacagcaccaagaagtgtgcagattccaacccgagaggggtgagcgcctacc
taagccggcccagcccgttcgacctgttcatccgcaagtcgcccacgatcacctgtctggtggtggacctggcacccagcaagggg
accgtgaacctgacctggtcccgggccagtgggaagcctgtgaaccactccaccagaaaggaggagaagcagcgcaatggcac
gttaaccgtcacgtccaccctgccggtgggcacccgagactggatcgagggggagacctaccagtgcagggtgacccaccccca
cctgcccagggccctcatgcggtccacgaccaagaccagcggcccgcgtgctgccccggaagtctatgcgtttgcgacgccgga
gtggccggggagccgggacaagcgcaccctcgcctgcctgatccagaacttcatgcctgaggacatctcggtgcagtggctgcac
aacgaggtgcagctcccggacgcccggcacagcacgacgcagccccgcaagaccaagggctccggcttcttcgtcttcagccgc
ctggaggtgaccagggccgaatgggagcagaaagatgagttcatctgccgtgcagtccatgaggcagcgagcccctcacagacc
gtccagcgagcggtgtctgtaaatcccggtaaagcggatccttcgaagctcccatcctgggccattaccttaatctcagtaaatggaat
ttttgtgatatgctgcctgacctactgctttgccccaagatgcagagagagaaggaggaatgagagattgagaagggaaagtgtacg
ccctgtataaatcgata
Amino acid sequence:
mdfqvqifsfllisasvimsrgvdivltqspttiaaspgekvtitcrasssvsymywyqqksgaspklwiydtsklasgvpnrfsg
sgsgtsyslaintmetedaatyycqqwsstpltfgsgtkleikrggggsggggsggggsqvqlkeagpglvqptqtlsltctvsgfs
ltsdgvhwirqppgkglewmgiiyydggtdynsaiksrlsisrdtsksqvflkinslqtddtamyycarihfdywgqgvmvtv
ssdhvcsrdftpptvkilqsscdggghfpptiqllclvsgytpgtinitwledgqvmdvdlstasttqegelastqseltlsqkhwls
drtytcqvtyqghtfedstkkcadsnprgvsaylsrpspfdlfirksptitclvvdlapskgtvnltwsrasgkpvnhstrkeekqrn
gtltvtstlpvgtrdwiegetyqcrvthphlpralmrsttktsgpraapevyafatpewpgsrdkrtlacliqnfmpedisvqwlhn
evqlpdarhsttqprktkgsgffvfsrlevtraeweqkdeficravheaaspsqtvqravsvnpgkadpsklpswaitlisvngifv
iccltycfaprcrerrrnerlrresvrpv
134.1D8 scFv hIgG1 (SSS-P)H WCH2 WCH3-mFADD-TM/CT
Nucleotide sequence
aagcttatggattttcaagtgcagattttcagcttcctgctaatcagtgcttcagtcataatgtccagaggagtcgacattgtgctcactca
gtctccaacaaccatagctgcatctccaggggagaaggtcaccatcacctgccgtgccagctccagtgtaagttacatgtactggtac
cagcagaagtcaggcgcctcccctaaactctggatttatgacacatccaagctggcttctggagttccaaatcgcttcagtggcagtg
ggtctgggacctcttattctctcgcaatcaacaccatggagactgaagatgctgccacttattactgtcagcagtggagtagtactccgc
tcacgttcgggtctgggaccaagctggagatcaaacggggtggcggtggctcgggcggtggtgggtcgggtggcggcggatctc
aggtgcagctgaaggaggcaggacctggcctggtgcaaccgacacagaccctgtccctcacatgcactgtctctgggttctcattaa
ccagcgatggtgtacactggattcgacagcctccaggaaagggtctggaatggatgggaataatatattatgatggaggcacagatt
ataattcagcaattaaatccagactgagcatcagcagggacacctccaagagccaagttttcttaaaaatcaacagtctgcaaactgat
gacacagccatgtattactgtgccagaatccactttgattactggggccaaggagtcatggtcacagtctcctctgatctggagcccaa
atcttctgacaaaactcacacatccccaccgtccccagcacctgaactcctgggtggaccgtcagtcttcctcttccccccaaaaccca
aggacaccctcatgatctcccggacccctgaggtcacatgcgtggtggtggacgtgagccacgaagaccctgaggtcaagttcaac
tggtacgtggacggcgtggaggtgcataatgccaagacaaagccgcgggaggagcagtacaacagcacgtaccgtgtggtcagc
gtcctcaccgtcctgcaccaggactggctgaatggcaaggagtacaagtgcaaggtctccaacaaagccctcccagcccccatcga
gaaaaccatctccaaagccaaagggcagccccgagaaccacaggtgtacaccctgcccccatcccgggatgagctgaccaagaa
ccaggtcagcctgacctgcctggtcaaaggcttctatcccagcgacatcgccgtggagtgggagagcaatgggcagccggagaac
aactacaagaccacgcctcccgtgctggactccgacggctccttcttcctctacagcaagctcaccgtggacaagagcaggtggca
gcaggggaacgtcttctcatgctccgtgatgcatgaggctctgcacaaccactacacgcagaagagcctctccctgtctccgggtaa
agcggatccttcgaacatggacccattcctggtgctgctgcactcgctgtccggcagcctgtcgggcaacgatctgatggagctcaa
gttcttgtgccgcgagcgcgtgagcaaacgaaagctggagcgcgtgcagagtggcctggacctgttcacggtgctgctggagcag
aacgacctggagcgcgggcacaccgggctgctgcgcgagttgctggcctcgctgcgccgacacgatctactgcagcgcctggac
gacttcgaggcggggacggcgaccgctgcgcccccgggggaggcagatctgcaggtggcatttgacattgtgtgtgacaatgtgg
ggagagactggaaaagactggcccgcgagctgaaggtgtctgaggccaagatggatgggattgaggagaagtacccccgaagtc
tgagtgagcgggtaagggagagtctgaaagtctggaagaatgctgagaagaagaacgcctcggtggccggactggtcaaggcgc
tgcggacctgcaggctgaatctggtggctgacctggtggaagaagcccaggaatctgtgagcaagagtgagaatatgtccccagta
ctaagggattcaactgtgtcttcctcagaaacaccctgactcgagatcgat
Amino acid sequence:
mdfqvqifsfllisasvimsrgvdivltqspttiaaspgekvtitcrasssvsymywyqqksgaspklwiydtsklasgvpnrfsg
sgsgtsyslaintmetedaatyycqqwsstpltfgsgtkleikrggggsggggsggggsqvqlkeagpglvqptqtlsltctvsgfs
ltsdgvhwirqppgkglewmgiiyydggtdynsaiksrlsisrdtsksqvflkinslqtddtamyycarihfdywgqgvmvtv
ssdlepkssdkthtsppspapellggpsvflfppkpkdtlmisrtpevtcvvvdvshedpevkfnwyvdgvevhnaktkpree
qynstyrvvsvltvlhqdwlngkeykckvsnkalpapiektiskakgqprepqvytlppsrdeltknqvsltclvkgfypsdiav
ewesngqpennykttppvldsdgsfflyskltvdksrwqqgnvfscsvmhealhnhytqkslslspgkadpsnmdpflvllhs
lsgslsgndlmelkflcrervskrklervqsgldlftvlleqndlerghtgllrellaslrrhdllqrlddfeagtataappgeadlqvaf
divcdnvgrdwkrlarelkvseakmdgieekyprslservreslkvwknaekknasvaglvkalrtcrlnlvadlveeaqesvs
ksenmspvlrdstvsssetp
135.1D8 scFv hIgG1 (SSS-P)H P238S CH2 WCH3-mFADD-TM/CT
Nucleotide sequence
aagcttatggattttcaagtgcagattttcagcttcctgctaatcagtgcttcagtcataatgtccagaggagtcgacattgtgctcactca
gtctccaacaaccatagctgcatctccaggggagaaggtcaccatcacctgccgtgccagctccagtgtaagttacatgtactggtac
cagcagaagtcaggcgcctcccctaaactctggatttatgacacatccaagctggcttctggagttccaaatcgcttcagtggcagtg
ggtctgggacctcttattctctcgcaatcaacaccatggagactgaagatgctgccacttattactgtcagcagtggagtagtactccgc
tcacgttcgggtctgggaccaagctggagatcaaacggggtggcggtggctcgggcggtggtgggtcgggtggcggcggatctc
aggtgcagctgaaggaggcaggacctggcctggtgcaaccgacacagaccctgtccctcacatgcactgtctctgggttctcattaa
ccagcgatggtgtacactggattcgacagcctccaggaaagggtctggaatggatgggaataatatattatgatggaggcacagatt
ataattcagcaattaaatccagactgagcatcagcagggacacctccaagagccaagttttcttaaaaatcaacagtctgcaaactgat
gacacagccatgtattactgtgccagaatccactttgattactggggccaaggagtcatggtcacagtctcctctgatctggagcccaa
atcttctgacaaaactcacacatccccaccgtccccagcacctgaactcctgggtggatcgtcagtcttcctcttccccccaaaaccca
aggacaccctcatgatctcccggacccctgaggtcacatgcgtggtggtggacgtgagccacgaagaccctgaggtcaagttcaac
tggtacgtggacggcgtggaggtgcataatgccaagacaaagccgcgggaggagcagtacaacagcacgtaccgtgtggtcagc
gtcctcaccgtcctgcaccaggactggctgaatggcaaggagtacaagtgcaaggtctccaacaaagccctcccagcccccatcga
gaaaaccatctccaaagccaaagggcagccccgagaaccacaggtgtacaccctgcccccatcccgggatgagctgaccaagaa
ccaggtcagcctgacctgcctggtcaaaggcttctatcccagcgacatcgccgtggagtgggagagcaatgggcagccggagaac
aactacaagaccacgcctcccgtgctggactccgacggctccttcttcctctacagcaagctcaccgtggacaagagcaggtggca
gcaggggaacgtcttctcatgctccgtgatgcatgaggctctgcacaaccactacacgcagaagagcctctccctgtctccgggtaa
agcggatccttcgaacatggacccattcctggtgctgctgcactcgctgtccggcagcctgtcgggcaacgatctgatggagctcaa
gttcttgtgccgcgagcgcgtgagcaaacgaaagctggagcgcgtgcagagtggcctggacctgttcacggtgctgctggagcag
aacgacctggagcgcgggcacaccgggctgctgcgcgagttgctggcctcgctgcgccgacacgatctactgcagcgcctggac
gacttcgaggcggggacggcgaccgctgcgcccccgggggaggcagatctgcaggtggcatttgacattgtgtgtgacaatgtgg
ggagagactggaaaagactggcccgcgagctgaaggtgtctgaggccaagatggatgggattgaggagaagtacccccgaagtc
tgagtgagcgggtaagggagagtctgaaagtctggaagaatgctgagaagaagaacgcctcggtggccggactggtcaaggcgc
tgcggacctgcaggctgaatctggtggctgacctggtggaagaagcccaggaatctgtgagcaagagtgagaatatgtccccagta
ctaagggattcaactgtgtcttcctcagaaacaccctgactcgagatcgat
Amino acid sequence:
mdfqvqifsfllisasvimsrgvdivltqspttiaaspgekvtitcrasssvsymywyqqksgaspklwiydtsklasgvpnrfsg
sgsgtsyslaintmetedaatyycqqwsstpltfgsgtkleikrggggsggggsggggsqvqlkeagpglvqptqtlsltctvsgfs
ltsdgvhwirqppgkglewmgiiyydggtdynsaiksrlsisrdtsksqvflkinslqtddtamyycarihfdywgqgvmvtv
ssdlepkssdkthtsppspapellggssvflfppkpkdtlmisrtpevtcvvvdvshedpevkfnwyvdgvevhnaktkpree
qynstyrvvsvltvlhqdwlngkeykckvsnkalpapiektiskakgqprepqvytlppsrdeltknqvsltclvkgfypsdiav
ewesngqpennykttppvldsdgsfflyskltvdksrwqqgnvfscsvmhealhnhytqkslslspgkadpsnmdpflvllhs
lsgslsgndlmelkflcrervskrklervqsgldlftvlleqndlerghtgllrellaslrrhdllqrlddfeagtataappgeadlqvaf
divcdnvgrdwkrlarelkvseakmdgieekyprslservreslkvwknaekknasvaglvkalrtcrlnlvadlveeaqesvs
ksenmspvlrdstvsssetp
136.1D8 scFv hIgG1 (SSS-P)H WCH2 WCH3-mcasp3-TM/CT
Nucleotide sequence:
aagcttatggattttcaagtgcagattttcagcttcctgctaatcagtgcttcagtcataatgtccagaggagtcgacattgtgctcactca
gtctccaacaaccatagctgcatctccaggggagaaggtcaccatcacctgccgtgccagctccagtgtaagttacatgtactggtac
cagcagaagtcaggcgcctcccctaaactctggatttatgacacatccaagctggcttctggagttccaaatcgcttcagtggcagtg
ggtctgggacctcttattctctcgcaatcaacaccatggagactgaagatgctgccacttattactgtcagcagtggagtagtactccgc
tcacgttcgggtctgggaccaagctggagatcaaacggggtggcggtggctcgggcggtggtgggtcgggtggcggcggatctc
aggtgcagctgaaggaggcaggacctggcctggtgcaaccgacacagaccctgtccctcacatgcactgtctctgggttctcattaa
ccagcgatggtgtacactggattcgacagcctccaggaaagggtctggaatggatgggaataatatattatgatggaggcacagatt
ataattcagcaattaaatccagactgagcatcagcagggacacctccaagagccaagttttcttaaaaatcaacagtctgcaaactgat
gacacagccatgtattactgtgccagaatccactttgattactggggccaaggagtcatggtcacagtctcctctgatctggagcccaa
atcttctgacaaaactcacacatccccaccgtccccagcacctgaactcctgggtggaccgtcagtcttcctcttccccccaaaaccca
aggacaccctcatgatctcccggacccctgaggtcacatgcgtggtggtggacgtgagccacgaagaccctgaggtcaagttcaac
tggtacgtggacggcgtggaggtgcataatgccaagacaaagccgcgggaggagcagtacaacagcacgtaccgtgtggtcagc
gtcctcaccgtcctgcaccaggactggctgaatggcaaggagtacaagtgcaaggtctccaacaaagccctcccagcccccatcga
gaaaaccatctccaaagccaaagggcagccccgagaaccacaggtgtacaccctgcccccatcccgggatgagctgaccaagaa
ccaggtcagcctgacctgcctggtcaaaggcttctatcccagcgacatcgccgtggagtgggagagcaatgggcagccggagaac
aactacaagaccacgcctcccgtgctggactccgacggctccttcttcctctacagcaagctcaccgtggacaagagcaggtggca
gcaggggaacgtcttctcatgctccgtgatgcatgaggctctgcacaaccactacacgcagaagagcctctccctgtctccgggtaa
agcggatccttcgaacatggagaacaacaaaacctcagtggattcaaaatccattaataattttgaagtaaagaccatacatgggagc
aagtcagtggactctgggatctatctggacagtagttacaaaatggattatcctgaaatgggcatatgcataataattaataataagaact
tccataagagcactggaatgtcatctcgctctggtacggatgtggacgcagccaacctcagagagacattcatgggcctgaaatacc
aagtcaggaataaaaatgatcttactcgtgaagacattttggaattaatggatagtgtttctaaggaagatcatagcaaaaggagcagct
ttgtgtgtgtgattctaagccatggtgatgaaggggtcatttatgggacaaatgggcctgttgaactgaaaaagttgactagcttcttcag
aggcgactactgccggagtctgactggaaagccgaaactcttcatcattcaggcctgccggggtacggagctggactgtggcattga
gacagacagtgggactgatgaggagatggcttgccagaagataccggtggaggctgacttcctgtatgcttactctacagcacctgg
ttactattcctggagaaattcaaaggacgggtcgtggttcatccagtccctttgcagcatgctgaagctgtacgcgcacaagctagaatt
tatgcacattctcactcgcgttaacaggaaggtggcaacggaattcgagtccttctccctggactccactttccacgcaaagaaacaga
tcccgtgtattgtgtccatgctcacgaaagaactgtacttttatcactagctcgagatcgatg
Amino acid sequence;
mdfqvqifsfllisasvimsrgvdivltqspttiaaspgekvtitcrasssvsymywyqqksgaspklwiydtsklasgvpnrfsg
sgsgtsyslaintmetedaatyycqqwsstpltfgsgtkleikrggggsggggsggggsqvqlkeagpglvqptqtlsltctvsgfs
ltsdgvhwirqppgkglewmgiiyydggtdynsaiksrlsisrdtsksqvflkinslqtddtamyycarihfdywgqgvmvtv
ssdlepkssdkthtsppspapellggpsvflfppkpkdtlmisrtpevtcvvvdvshedpevkfnwyvdgvevhnaktkpree
qynstyrvvsvltvlhqdwlngkeykckvsnkalpapiektiskakgqprepqvytlppsrdeltknqvsltclvkgfypsdiav
ewesngqpennykttppvldsdgsfflyskltvdksrwqqgnvfscsvmhealhnhytqkslslspgkadpsnmennktsvd
sksinnfevktihgsksvdsgiyldssykmdypemgiciiinnknfhkstgmssrsgtdvdaanlretfmglkyqvrnkndltr
edilelmdsvskedhskrssfvcvilshgdegviygtngpvelkkltsffrgdycrsltgkpklfiiqacrgteldcgietdsgtdee
macqkipveadflyaystapgyyswrnskdgswfiqslcsmlklyahklefmhiltrvnrkvatefesfsldstfhakkqipciv
smltkelyfyh
137.1D8 scFv hIgG1 (SSS-P)H P238S CH2 WCH3-mcasp3-TM/CT
Nucleotide sequence:
Aagcttatggattttcaagtgcagattttcagcttcctgctaatcagtgcttcagtcataatgtccagaggagtcgacattgtgctcactca
gtctccaacaaccatagctgcatctccaggggagaaggtcaccatcacctgccgtgccagctccagtgtaagttacatgtactggtac
cagcagaagtcaggcgcctcccctaaactctggatttatgacacatccaagctggcttctggagttccaaatcgcttcagtggcagtg
ggtctgggacctcttattctctcgcaatcaacaccatggagactgaagatgctgccacttattactgtcagcagtggagtagtactccgc

[0861] tcacgttcgggtctgggaccaagctggagatcaaacggggtggcggtggctcgggcggtggtgggtcgggtggcggcggatctc
aggtgcagctgaaggaggcaggacctggcctggtgcaaccgacacagaccctgtccctcacatgcactgtctctgggttctcattaa
ccagcgatggtgtacactggattcgacagcctccaggaaagggtctggaatggatgggaataatatattatgatggaggcacagatt
ataattcagcaattaaatccagactgagcatcagcagggacacctccaagagccaagttttcttaaaaatcaacagtctgcaaactgat
gacacagccatgtattactgtgccagaatccactttgattactggggccaaggagtcatggtcacagtctcctctga
Amino acid sequence:
mdfqvqifsfllisasvimsrgvdivltqspttiaaspgekvtitcrasssvsymywyqqksgaspklwiydtsklasgvpnrfsg
sgsgtsyslaintmetedaatyycqqwsstpltfgsgtkleikrggggsggggsggggsqvqlkeagpglvqptqtlsltctvsgfs
ltsdgvhwirqppgkglewmgiiyydggtdynsaiksrlsisrdtsksqvflkinslqtddtamyycarihfdywgqgvmvtv
ssdlepkssdkthtsppspapellggssvflfppkpkdtlmisrtpevtcvvvdvshedpevkfnwyvdgvevhnaktkpree
qynstyrvvsvltvlhqdwlngkeykckvsnkalpapiektiskakgqprepqvytlppsrdeltknqvsltclvkgfypsdiav
ewesngqpennykttppvldsdgsfflyskltvdksrwqqgnvfscsvmhealhnhytqkslslspgkadpsnsnmennkts
vdsksinnfevktihgsksvdsgiyldssykmdypemgiciiinnknfhkstgmssrsgtdvdaanlretfmglkyqvrnknd
ltredilelmdsvskedhskrssfvcvilshgdegviygtngpvelkkltsffrgdycrsltgkpklfiiqacrgteldcgietdsgtde
emacqkipveadflyaystapgyyswrnskdgswfiqslcsmlklyahklefmhiltrvnrkvatefesfsldstfhakkqipci
vsmltkelyfyh
138.1D8 scFv hIgG1 (SSS-P)H WCH2 WCH3-mcasp8-TM/CT
Nucleotide sequence
aagcttatggattttcaagtgcagattttcagcttcctgctaatcagtgcttcagtcataatgtccagaggagtcgacattgtgctcactca
gtctccaacaaccatagctgcatctccaggggagaaggtcaccatcacctgccgtgccagctccagtgtaagttacatgtactggtac
cagcagaagtcaggcgcctcccctaaactctggatttatgacacatccaagctggcttctggagttccaaatcgcttcagtggcagtg
ggtctgggacctcttattctctcgcaatcaacaccatggagactgaagatgctgccacttattactgtcagcagtggagtagtactccgc
tcacgttcgggtctgggaccaagctggagatcaaacggggtggcggtggctcgggcggtggtgggtcgggtggcggcggatctc
aggtgcagctgaaggaggcaggacctggcctggtgcaaccgacacagaccctgtccctcacatgcactgtctctgggttctcattaa
ccagcgatggtgtacactggattcgacagcctccaggaaagggtctggaatggatgggaataatatattatgatggaggcacagatt
ataattcagcaattaaatccagactgagcatcagcagggacacctccaagagccaagttttcttaaaaatcaacagtctgcaaactgat
gacacagccatgtattactgtgccagaatccactttgattactggggccaaggagtcatggtcacagtctcctctgatctggagcccaa
atcttctgacaaaactcacacatccccaccgtccccagcacctgaactcctgggtggaccgtcagtcttcctcttccccccaaaaccca
aggacaccctcatgatctcccggacccctgaggtcacatgcgtggtggtggacgtgagccacgaagaccctgaggtcaagttcaac
tggtacgtggacggcgtggaggtgcataatgccaagacaaagccgcgggaggagcagtacaacagcacgtaccgtgtggtcagc
gtcctcaccgtcctgcaccaggactggctgaatggcaaggagtacaagtgcaaggtctccaacaaagccctcccagcccccatcga
gaaaaccatctccaaagccaaagggcagccccgagaaccacaggtgtacaccctgcccccatcccgggatgagctgaccaagaa
ccaggtcagcctgacctgcctggtcaaaggcttctatcccagcgacatcgccgtggagtgggagagcaatgggcagccggagaac
aactacaagaccacgcctcccgtgctggactccgacggctccttcttcctctacagcaagctcaccgtggacaagagcaggtggca
gcaggggaacgtcttctcatgctccgtgatgcatgaggctctgcacaaccactacacgcagaagagcctctccctgtctccgggtaa
agcggatccttcgaacatggatttccagagttgtctttatgctattgctgaagaactgggcagtgaagacctggctgccctcaagttcct
gtgcttggactacatcccacacaagaagcaggagaccatcgaggatgcccagaagctatttctgaggctgcgggaaaaggggatgt
tggaggaaggcaatctgtctttcctgaaagagctgcttttccacatcagtcggtgggacctgctggtcaacttcctagactgcaaccga
gaggagatggtgagagagctgcgggatccagacaatgcccagatttctccctacagggtcatgctctttaagctctcagaagaagtg
agcgagttggaattgagatcttttaagttccttttgaacaatgagatccccaaatgtaagctggaagatgacttgagcctgcttgaaatttt
tgtagaaatggagaagaggaccatgctggcagaaaataacttggaaaccctaaaatcaatctgtgaccaggtcaacaagagcctgct
ggggaagatcgaggattatgaaagatcaagcacagagagaagaatgagccttgaaggaagggaagagttgccaccttcagttttgg
atgagatgagcctcaaaatggcggaactgtgtgactcgccaagagaacaagacagtgagtcacggacttcagacaaagtttaccaa
atgaagaacaaacctcggggatactgtctgatcatcaacaatcatgatttcagcaaggcccgggaagacataacccaactccgaaaa
atgaaggacagaaaaggaacagactgtgataaagaggctctgagtaagacctttaaggagcttcattttgagatagtatcttacgacg
actgcactgcaaatgaaatccacgagattctagaaggctaccaaagcgcagaccacaagaacaaagactgcttcatctgctgtatcct
atcccacggtgacaagggtgtcgtctatggaacggatgggaaggaggcctccatctatgacctgacatcttacttcactggttcaaagt
gcccttccctgtctgggaaacccaagatctttttcattcaggcttgccaaggaagtaacttccagaaaggagtgcctgatgaggcagg
cttcgagcaacagaaccacactttagaagtggattcatcatctcacaagaactatattccggatgaggcagactttctgctgggaatgg
ctacggtgaagaactgcgtttcctaccgagatcctgtgaatggaacctggtatattcagtcactttgccagagcctgagggaaagatgt
cctcaaggagatgacattcttagcatcctgactggcgtgaactatgacgtgagcaataaagacgacaggaggaacaagggaaagca
gatgccacagcccaccttcacactacggaagaagctcttcttccctccctaatgactcgagatcgatt
Amino acid sequence
mdfqvqifsfllisasvimsrgvdivltqspttiaaspgekvtitcrasssvsymywyqqksgaspklwiydtsklasgvpnrfsg
sgsgtsyslaintmetedaatyycqqwsstpltfgsgtkleikrggggsggggsggggsqvqlkeagpglvqptqtlsltctvsgfs
ltsdgvhwirqppgkglewmgiiyydggtdynsaiksrlsisrdtsksqvflkinslqtddtamyycarihfdywgqgvmvtv
ssdlepkssdkthtsppspapellggpsvflfppkpkdtlmisrtpevtcvvvdvshedpevkfnwyvdgvevhnaktkpree
qynstyrvvsvltvlhqdwlngkeykckvsnkalpapiektiskakgqprepqvytlppsrdeltknqvsltclvkgfypsdiav
ewesngqpennykttppvldsdgsfflyskltvdksrwqqgnvfscsvmhealhnhytqkslslspgkadpsnmdfqsclyai
aeelgsedlaalkflcldyiphkkqetiedaqklflrlrekgmleegnlsflkellfhisrwdllvnfldcnreemvrelrdpdnaqis
pyrvmlfklseevselelrsfkfllnneipkckleddlslleifvemekrtmlaennletlksicdqvnksllgkiedyerssterrms
legreelppsvldemslkmaelcdspreqdsesrtsdkvyqmknkprgycliinnhdfskareditqlrkmkdrkgtdcdkeal
sktfkelhfeivsyddctaneiheilegyqsadhknkdcficcilshgdkgvvygtdgkeasiydltsyftgskcpslsgkpkiffi
qacqgsnfqkgvpdeagfeqqnhtlevdssshknyipdeadfllgmatvkncvsyrdpvngtwyiqslcqslrercpqgddil
siltgvnydvsnkddrrnkgkqmpqptftlrkklffpp
139.1D8 scFv hIgG1 (SSS-P)H P238SCH2 WCH3-mcasp8-TM/CT
Nucleotide sequence
aagcttatggattttcaagtgcagattttcagcttcctgctaatcagtgcttcagtcataatgtccagaggagtcgacattgtgctcactca
gtctccaacaaccatagctgcatctccaggggagaaggtcaccatcacctgccgtgccagctccagtgtaagttacatgtactggtac
cagcagaagtcaggcgcctcccctaaactctggatttatgacacatccaagctggcttctggagttccaaatcgcttcagtggcagtg
ggtctgggacctcttattctctcgcaatcaacaccatggagactgaagatgctgccacttattactgtcagcagtggagtagtactccgc
tcacgttcgggtctgggaccaagctggagatcaaacggggtggcggtggctcgggcggtggtgggtcgggtggcggcggatctc
aggtgcagctgaaggaggcaggacctggcctggtgcaaccgacacagaccctgtccctcacatgcactgtctctgggttctcattaa
ccagcgatggtgtacactggattcgacagcctccaggaaagggtctggaatggatgggaataatatattatgatggaggcacagatt
ataattcagcaattaaatccagactgagcatcagcagggacacctccaagagccaagttttcttaaaaatcaacagtctgcaaactgat
gacacagccatgtattactgtgccagaatccactttgattactggggccaaggagtcatggtcacagtctcctctgatctggagcccaa
atcttctgacaaaactcacacatccccaccgtccccagcacctgaactcctgggtggatcgtcagtcttcctcttccccccaaaaccca
aggacaccctcatgatctcccggacccctgaggtcacatgcgtggtggtggacgtgagccacgaagaccctgaggtcaagttcaac
tggtacgtggacggcgtggaggtgcataatgccaagacaaagccgcgggaggagcagtacaacagcacgtaccgtgtggtcagc
gtcctcaccgtcctgcaccaggactggctgaatggcaaggagtacaagtgcaaggtctccaacaaagccctcccagcccccatcga
gaaaaccatctccaaagccaaagggcagccccgagaaccacaggtgtacaccctgcccccatcccgggatgagctgaccaagaa
ccaggtcagcctgacctgcctggtcaaaggcttctatcccagcgacatcgccgtggagtgggagagcaatgggcagccggagaac
aactacaagaccacgcctcccgtgctggactccgacggctccttcttcctctacagcaagctcaccgtggacaagagcaggtggca
gcaggggaacgtcttctcatgctccgtgatgcatgaggctctgcacaaccactacacgcagaagagcctctccctgtctccgggtaa
agcggatccttcgaacatggatttccagagttgtctttatgctattgctgaagaactgggcagtgaagacctggctgccctcaagttcct
gtgcttggactacatcccacacaagaagcaggagaccatcgaggatgcccagaagctatttctgaggctgcgggaaaaggggatgt
tggaggaaggcaatctgtctttcctgaaagagctgcttttccacatcagtcggtgggacctgctggtcaacttcctagactgcaaccga
gaggagatggtgagagagctgcgggatccagacaatgcccagatttctccctacagggtcatgctctttaagctctcagaagaagtg
agcgagttggaattgagatcttttaagttccttttgaacaatgagatccccaaatgtaagctggaagatgacttgagcctgcttgaaatttt
tgtagaaatggagaagaggaccatgctggcagaaaataacttggaaaccctaaaatcaatctgtgaccaggtcaacaagagcctgct
ggggaagatcgaggattatgaaagatcaagcacagagagaagaatgagccttgaaggaagggaagagttgccaccttcagttttgg
atgagatgagcctcaaaatggcggaactgtgtgactcgccaagagaacaagacagtgagtcacggacttcagacaaagtttaccaa
atgaagaacaaacctcggggatactgtctgatcatcaacaatcatgatttcagcaaggcccgggaagacataacccaactccgaaaa
atgaaggacagaaaaggaacagactgtgataaagaggctctgagtaagacctttaaggagcttcattttgagatagtatcttacgacg
actgcactgcaaatgaaatccacgagattctagaaggctaccaaagcgcagaccacaagaacaaagactgcttcatctgctgtatcct
atcccacggtgacaagggtgtcgtctatggaacggatgggaaggaggcctccatctatgacctgacatcttacttcactggttcaaagt
gcccttccctgtctgggaaacccaagatctttttcattcaggcttgccaaggaagtaacttccagaaaggagtgcctgatgaggcagg
cttcgagcaacagaaccacactttagaagtggattcatcatctcacaagaactatattccggatgaggcagactttctgctgggaatgg
ctacggtgaagaactgcgtttcctaccgagatcctgtgaatggaacctggtatattcagtcactttgccagagcctgagggaaagatgt
cctcaaggagatgacattcttagcatcctgactggcgtgaactatgacgtgagcaataaagacgacaggaggaacaagggaaagca
gatgccacagcccaccttcacactacggaagaagctcttcttccctccctaatgactcgagatcgattc
Amino acid sequence
mdfqvqifsfllisasvimsrgvdivltqspttiaaspgekvtitcrasssvsymywyqqksgaspklwiydtsklasgvpnrfsg
sgsgtsyslaintmetedaatyycqqwsstpltfgsgtkleikrggggsggggsggggsqvqlkeagpglvqptqtlsltctvsgfs
ltsdgvhwirqppgkglewmgiiyydggtdynsaiksrlsisrdtsksqvflkinslqtddtamyycarihfdywgqgvmvtv
ssdlepkssdkthtsppspapellggssvflfppkpkdtlmisrtpevtcvvvdvshedpevkfnwyvdgvevhnaktkpree
qynstyrvvsvltvlhqdwlngkeykckvsnkalpapiektiskakgqprepqvytlppsrdeltknqvsltclvkgfypsdiav
ewesngqpennykttppvldsdgsfflyskltvdksrwqqgnvfscsvmhealhnhytqkslslspgkadpsnmdfqsclyai
aeelgsedlaalkflcldyiphkkqetiedaqklflrlrekgmleegnlsflkellfhisrwdllvnfldcnreemvrelrdpdnaqis
pyrvmlfklseevselelrsfkfllnneipkckleddlslleifvemekrtmlaennletlksicdqvnksllgkiedyerssterrms
legreelppsvldemslkmaelcdspreqdsesrtsdkvyqmknkprgycliinnhdfskareditqlrkmkdrkgtdcdkeal
sktfkelhfeivsyddctaneiheilegyqsadhknkdcficcilshgdkgvvygtdgkeasiydltsyftgskcpslsgkpkiffi
qacqgsnfqkgvpdeagfeqqnhtlevdssshknyipdeadfllgmatvkncvsyrdpvngtwyiqslcqslrercpqgddil
siltgvnydvsnkddrrnkgkqmpqptftlrkklffpp
140.1D8 scFv hIgG1 (SSS-P)H WCH2 WCH3-hcasp3-TM/CT
aagcttatggattttcaagtgcagattttcagcttcctgctaatcagtgcttcagtcataatgtccagaggagtcgacattgtgctcactca
gtctccaacaaccatagctgcatctccaggggagaaggtcaccatcacctgccgtgccagctccagtgtaagttacatgtactggtac
cagcagaagtcaggcgcctcccctaaactctggatttatgacacatccaagctggcttctggagttccaaatcgcttcagtggcagtg
ggtctgggacctcttattctctcgcaatcaacaccatggagactgaagatgctgccacttattactgtcagcagtggagtagtactccgc
tcacgttcgggtctgggaccaagctggagatcaaacggggtggcggtggctcgggcggtggtgggtcgggtggcggcggatctc
aggtgcagctgaaggaggcaggacctggcctggtgcaaccgacacagaccctgtccctcacatgcactgtctctgggttctcattaa
ccagcgatggtgtacactggattcgacagcctccaggaaagggtctggaatggatgggaataatatattatgatggaggcacagatt
ataattcagcaattaaatccagactgagcatcagcagggacacctccaagagccaagttttcttaaaaatcaacagtctgcaaactgat
gacacagccatgtattactgtgccagaatccactttgattactggggccaaggagtcatggtcacagtctcctctgatctggagcccaa
atcttctgacaaaactcacacatccccaccgtccccagcacctgaactcctgggtggaccgtcagtcttcctcttccccccaaaaccca
aggacaccctcatgatctcccggacccctgaggtcacatgcgtggtggtggacgtgagccacgaagaccctgaggtcaagttcaac
tggtacgtggacggcgtggaggtgcataatgccaagacaaagccgcgggaggagcagtacaacagcacgtaccgtgtggtcagc
gtcctcaccgtcctgcaccaggactggctgaatggcaaggagtacaagtgcaaggtctccaacaaagccctcccagcccccatcga
gaaaaccatctccaaagccaaagggcagccccgagaaccacaggtgtacaccctgcccccatcccgggatgagctgaccaagaa
ccaggtcagcctgacctgcctggtcaaaggcttctatcccagcgacatcgccgtggagtgggagagcaatgggcagccggagaac
aactacaagaccacgcctcccgtgctggactccgacggctccttcttcctctacagcaagctcaccgtggacaagagcaggtggca
gcaggggaacgtcttctcatgctccgtgatgcatgaggctctgcacaaccactacacgcagaagagcctctccctgtctccgggtaa
agcggatccttcgaacatggagaacactgaaaactcagtggattcaaaatccattaaaaatttggaaccaaagatcatacatggaagc
gaatcaatggactctggaatatccctggacaacagttataaaatggattatcctgagatgggtttatgtataataattaataataagaatttt
cataaaagcactggaatgacatctcggtctggtacagatgtcgatgcagcaaacctcagggaaacattcagaaacttgaaatatgaag
tcaggaataaaaatgatcttacacgtgaagaaattgtggaattgatgcgtgatgtttctaaagaagatcacagcaaaaggagcagttttg
tttgtgtgcttctgagccatggtgaagaaggaataatttttggaacaaatggacctgttgacctgaaaaaaataacaaactttttcagagg
ggatcgttgtagaagtctaactggaaaacccaaacttttcattattcaggcctgccgtggtacagaactggactgtggcattgagacag
acagtggtgttgatgatgacatggcgtgtcataaaataccagtggaggccgacttcttgtatgcatactccacagcacctggttattattc
ttggcgaaattcaaaggatggctcctggttcatccagtcgctttgtgccatgctgaaacagtatgccgacaagcttgaatttatgcacatt
cttacccgggttaaccgaaaggtggcaacagaatttgagtccttttcctttgacgctacttttcatgcaaagaaacagattccatgtattgt
ttccatgctcacaaaagaactctatttttatcactaactcgagatcgata
Amino acid sequence:
mdfqvqifsfllisasvimsrgvdivltqspttiaaspgekvtitcrasssvsymywyqqksgaspklwiydtsklasgvpnrfsg
sgsgtsyslaintmetedaatyycqqwsstpltfgsgtkleikrggggsggggsggggsqvqlkeagpglvqptqtlsltctvsgfs
ltsdgvhwirqppgkglewmgiiyydggtdynsaiksrlsisrdtsksqvflkinslqtddtamyycarihfdywgqgvmvtv
ssdlepkssdkthtsppspapellggpsvflfppkpkdtlmisrtpevtcvvvdvshedpevkfnwyvdgvevhnaktkpree
qynstyrvvsvltvlhqdwlngkeykckvsnkalpapiektiskakgqprepqvytlppsrdeltknqvsltclvkgfypsdiav
ewesngqpennykttppvldsdgsfflyskltvdksrwqqgnvfscsvmhealhnhytqkslslspgkadpsnmentensvd
sksiknlepkiihgsesmdsgisldnsykmdypemglciiinnknfhkstgmtsrsgtdvdaanlretfrnlkyevrnkndltre
eivelmrdvskedhskrssfvcvllshgeegiifgtngpvdlkkitnffrgdrcrsltgkpklfiiqacrgteldcgietdsgvdddm
achkipveadflyaystapgyyswrnskdgswfiqslcamlkqyadklefmhiltrvnrkvatefesfsfdatfhakkqipcivs
mltkelyfyh
141. 1D8 scFv hIgG1 (SSS-P)H P238SCH2 WCH3-hcasp3-TM/CT
Nucleotide sequence:
aagcttatggattttcaagtgcagattttcagcttcctgctaatcagtgcttcagtcataatgtccagaggagtcgacattgtgctcactca
gtctccaacaaccatagctgcatctccaggggagaaggtcaccatcacctgccgtgccagctccagtgtaagttacatgtactggtac
cagcagaagtcaggcgcctcccctaaactctggatttatgacacatccaagctggcttctggagttccaaatcgcttcagtggcagtg
ggtctgggacctcttattctctcgcaatcaacaccatggagactgaagatgctgccacttattactgtcagcagtggagtagtactccgc
tcacgttcgggtctgggaccaagctggagatcaaacggggtggcggtggctcgggcggtggtgggtcgggtggcggcggatctc
aggtgcagctgaaggaggcaggacctggcctggtgcaaccgacacagaccctgtccctcacatgcactgtctctgggttctcattaa
ccagcgatggtgtacactggattcgacagcctccaggaaagggtctggaatggatgggaataatatattatgatggaggcacagatt
ataattcagcaattaaatccagactgagcatcagcagggacacctccaagagccaagttttcttaaaaatcaacagtctgcaaactgat
gacacagccatgtattactgtgccagaatccactttgattactggggccaaggagtcatggtcacagtctcctctgatctggagcccaa
atcttctgacaaaactcacacatccccaccgtccccagcacctgaactcctgggtggatcgtcagtcttcctcttccccccaaaaccca
aggacaccctcatgatctcccggacccctgaggtcacatgcgtggtggtggacgtgagccacgaagaccctgaggtcaagttcaac
tggtacgtggacggcgtggaggtgcataatgccaagacaaagccgcgggaggagcagtacaacagcacgtaccgtgtggtcagc
gtcctcaccgtcctgcaccaggactggctgaatggcaaggagtacaagtgcaaggtctccaacaaagccctcccagcccccatcga
gaaaaccatctccaaagccaaagggcagccccgagaaccacaggtgtacaccctgcccccatcccgggatgagctgaccaagaa
ccaggtcagcctgacctgcctggtcaaaggcttctatcccagcgacatcgccgtggagtgggagagcaatgggcagccggagaac
aactacaagaccacgcctcccgtgctggactccgacggctccttcttcctctacagcaagctcaccgtggacaagagcaggtggca
gcaggggaacgtcttctcatgctccgtgatgcatgaggctctgcacaaccactacacgcagaagagcctctccctgtctccgggtaa
agcggatccttcgaacatggagaacactgaaaactcagtggattcaaaatccattaaaaatttggaaccaaagatcatacatggaagc
gaatcaatggactctggaatatccctggacaacagttataaaatggattatcctgagatgggtttatgtataataattaataataagaatttt
cataaaagcactggaatgacatctcggtctggtacagatgtcgatgcagcaaacctcagggaaacattcagaaacttgaaatatgaag
tcaggaataaaaatgatcttacacgtgaagaaattgtggaattgatgcgtgatgtttctaaagaagatcacagcaaaaggagcagttttg
tttgtgtgcttctgagccatggtgaagaaggaataatttttggaacaaatggacctgttgacctgaaaaaaataacaaactttttcagagg
ggatcgttgtagaagtctaactggaaaacccaaacttttcattattcaggcctgccgtggtacagaactggactgtggcattgagacag
acagtggtgttgatgatgacatggcgtgtcataaaataccagtggaggccgacttcttgtatgcatactccacagcacctggttattattc
ttggcgaaattcaaaggatggctcctggttcatccagtcgctttgtgccatgctgaaacagtatgccgacaagcttgaatttatgcacatt
cttacccgggttaaccgaaaggtggcaacagaatttgagtccttttcctttgacgctacttttcatgcaaagaaacagattccatgtattgt
ttccatgctcacaaaagaactctatttttatcactaactcgagatcgataa
Amino acid sequence:
mdfqvqifsfllisasvimsrgvdivltqspttiaaspgekvtitcrasssvsymywyqqksgaspklwiydtsklasgvpnrfsg
sgsgtsyslaintmetedaatyycqqwsstpltfgsgtkleikrggggsggggsggggsqvqlkeagpglvqptqtlsltctvsgfs
ltsdgvhwirqppgkglewmgiiyydggtdynsaiksrlsisrdtsksqvflkinslqtddtamyycarihfdywgqgvmvtv
ssdlepkssdkthtsppspapellggssvflfppkpkdtlmisrtpevtcvvvdvshedpevkfnwyvdgvevhnaktkpree
qynstyrvvsvltvlhqdwlngkeykckvsnkalpapiektiskakgqprepqvytlppsrdeltknqvsltclvkgfypsdiav
ewesngqpennykttppvldsdgsfflyskltvdksrwqqgnvfscsvmhealhnhytqkslslspgkadpsnmentensvd
sksiknlepkiihgsesmdsgisldnsykmdypemglciiinnknfhkstgmtsrsgtdvdaanlretfrnlkyevrnkndltre
eivelmrdvskedhskrssfvcvllshgeegiifgtngpvdlkkitnffrgdrcrsltgkpklfiiqacrgteldcgietdsgvdddm
achkipveadflyaystapgyyswrnskdgswfiqslcamlkqyadklefmhiltrvnrkvatefesfsfdatfhakkqipcivs
mltkelyfyh
142.1D8 scFv hIgG1 (SSS-S)H WCH2 WCH3-hcasp8-TM/CT
Nucleotide sequence:
aagcttatggattttcaagtgcagattttcagcttcctgctaatcagtgcttcagtcataatgtccagaggagtcgacattgtgctcactca
gtctccaacaaccatagctgcatctccaggggagaaggtcaccatcacctgccgtgccagctccagtgtaagttacatgtactggtac
cagcagaagtcaggcgcctcccctaaactctggatttatgacacatccaagctggcttctggagttccaaatcgcttcagtggcagtg
ggtctgggacctcttattctctcgcaatcaacaccatggagactgaagatgctgccacttattactgtcagcagtggagtagtactccgc
tcacgttcgggtctgggaccaagctggagatcaaacggggtggcggtggctcgggcggtggtgggtcgggtggcggcggatctc
aggtgcagctgaaggaggcaggacctggcctggtgcaaccgacacagaccctgtccctcacatgcactgtctctgggttctcattaa
ccagcgatggtgtacactggattcgacagcctccaggaaagggtctggaatggatgggaataatatattatgatggaggcacagatt
ataattcagcaattaaatccagactgagcatcagcagggacacctccaagagccaagttttcttaaaaatcaacagtctgcaaactgat
gacacagccatgtattactgtgccagaatccactttgattactggggccaaggagtcatggtcacagtctcctctgatctggagcccaa
atcttctgacaaaactcacacatccccaccgtccccagcacctgaactcctgggtggaccgtcagtcttcctcttccccccaaaaccca
aggacaccctcatgatctcccggacccctgaggtcacatgcgtggtggtggacgtgagccacgaagaccctgaggtcaagttcaac
tggtacgtggacggcgtggaggtgcataatgccaagacaaagccgcgggaggagcagtacaacagcacgtaccgtgtggtcagc
gtcctcaccgtcctgcaccaggactggctgaatggcaaggagtacaagtgcaaggtctccaacaaagccctcccagcccccatcga
gaaaaccatctccaaagccaaagggcagccccgagaaccacaggtgtacaccctgcccccatcccgggatgagctgaccaagaa
ccaggtcagcctgacctgcctggtcaaaggcttctatcccagcgacatcgccgtggagtgggagagcaatgggcagccggagaac
aactacaagaccacgcctcccgtgctggactccgacggctccttcttcctctacagcaagctcaccgtggacaagagcaggtggca
gcaggggaacgtcttctcatgctccgtgatgcatgaggctctgcacaaccactacacgcagaagagcctctccctgtctccgggtaa
agcggatccttcgaacatggacttcagcagaaatctttatgatattggggaacaactggacagtgaagatctggcctccctcaagttcc
tgagcctggactacattccgcaaaggaagcaagaacccatcaaggatgccttgatgttattccagagactccaggaaaagagaatgt
tggaggaaagcaatctgtccttcctgaaggagctgctcttccgaattaatagactggatttgctgattacctacctaaacactagaaagg
aggagatggaaagggaacttcagacaccaggcagggctcaaatttctgcctacagggtcatgctctatcagatttcagaagaagtga
gcagatcagaattgaggtcttttaagtttcttttgcaagaggaaatctccaaatgcaaactggatgatgacatgaacctgctggatattttc
atagagatggagaagagggtcatcctgggagaaggaaagttggacatcctgaaaagagtctgtgcccaaatcaacaagagcctgct
gaagataatcaacgactatgaagaattcagcaaagagagaagcagcagccttgaaggaagtcctgatgaattttcaaatggggagg
agttgtgtggggtaatgacaatctcggactctccaagagaacaggatagtgaatcacagactttggacaaagtttaccaaatgaaaag
caaacctcggggatactgtctgatcatcaacaatcacaattttgcaaaagcacgggagaaagtgcccaaacttcacagcattaggga
caggaatggaacacacttggatgcaggggctttgaccacgacctttgaagagcttcattttgagatcaagccccacgatgactgcaca
gtagagcaaatctatgagattttgaaaatctaccaactcatggaccacagtaacatggactgcttcatctgctgtatcctctcccatggag
acaagggcatcatctatggcactgatggacaggaggcccccatctatgagctgacatctcagttcactggtttgaagtgcccttccctt
gctggaaaacccaaagtgttttttattcaggcttgtcagggggataactaccagaaaggtatacctgttgagactgattcagaggagca
accctatttagaaatggatttatcatcacctcaaacgagatatatcccggatgaggctgactttctgctggggatggccactgtgaataa
ctgtgtttcctaccgaaaccctgcagagggaacctggtacatccagtcactttgccagagcctgagagagcgatgtcctcgaggcga
tgatattctcaccatcctgactgaagtgaactatgaagtaagcaacaaggatgacaagaaaaacatggggaaacagatgcctcagcc
tactttcacactaagaaaaaaacttgtcttcccttctgattgagcatgcatcgata
Amino acid sequence:
mdfqvqifsfllisasvimsrgvdivltqspttiaaspgekvtitcrasssvsymywyqqksgaspklwiydtsklasgvpnrfsg
sgsgtsyslaintmetedaatyycqqwsstpltfgsgtkleikrggggsggggsggggsqvqlkeagpglvqptqtlsltctvsgfs
ltsdgvhwirqppgkglewmgiiyydggtdynsaiksrlsisrdtsksqvflkinslqtddtamyycarihfdywgqgvmvtv
ssdlepkssdkthtsppspapellggpsvflfppkpkdtlmisrtpevtcvvvdvshedpevkfnwyvdgvevhnaktkpree
qynstyrvvsvltvlhqdwlngkeykckvsnkalpapiektiskakgqprepqvytlppsrdeltknqvsltclvkgfypsdiav
ewesngqpennykttppvldsdgsfflyskltvdksrwqqgnvfscsvmhealhnhytqkslslspgkadpsnmdfsrnlydi
geqldsedlaslkflsldyipqrkqepikdalmlfqrlqekrmleesnlsflkellfrinrldllitylntrkeemerelqtpgraqisay
rvmlyqiseevsrselrsfkfllqeeiskckldddmnlldifiemekrvilgegkldilkrvcaqinksllkiindyeefskersssle
gspdefsngeelcgvmtisdspreqdsesqtldkvyqmkskprgycliinnhnfakarekvpklhsirdrngthldagaltttfee
lhfeikphddctveqiyeilkiyqlmdhsnmdcficcilshgdkgiiygtdgqeapiyeltsqftglkcpslagkpkvffiqacqg
dnyqkgipvetdseeqpylemdlsspqtryipdeadfllgmatvnncvsyrnpaegtwyiqslcqslrercprgddiltiltevny
evsnkddkknmgkqmpqptftlrkklvfpsd
143.1D8 scFv hIgG1 (SSS-S)H P238SCH2 WCH3-hcasp8-TM/CT
Nucleotide sequence:
aagcttatggattttcaagtgcagattttcagcttcctgctaatcagtgcttcagtcataatgtccagaggagtcgacattgtgctcactca
gtctccaacaaccatagctgcatctccaggggagaaggtcaccatcacctgccgtgccagctccagtgtaagttacatgtactggtac
cagcagaagtcaggcgcctcccctaaactctggatttatgacacatccaagctggcttctggagttccaaatcgcttcagtggcagtg
ggtctgggacctcttattctctcgcaatcaacaccatggagactgaagatgctgccacttattactgtcagcagtggagtagtactccgc
tcacgttcgggtctgggaccaagctggagatcaaacggggtggcggtggctcgggcggtggtgggtcgggtggcggcggatctc
aggtgcagctgaaggaggcaggacctggcctggtgcaaccgacacagaccctgtccctcacatgcactgtctctgggttctcattaa
ccagcgatggtgtacactggattcgacagcctccaggaaagggtctggaatggatgggaataatatattatgatggaggcacagatt
ataattcagcaattaaatccagactgagcatcagcagggacacctccaagagccaagttttcttaaaaatcaacagtctgcaaactgat
gacacagccatgtattactgtgccagaatccactttgattactggggccaaggagtcatggtcacagtctcctctgatctggagcccaa
atcttctgacaaaactcacacatccccaccgtccccagcacctgaactcctgggtggatcgtcagtcttcctcttccccccaaaaccca
aggacaccctcatgatctcccggacccctgaggtcacatgcgtggtggtggacgtgagccacgaagaccctgaggtcaagttcaac
tggtacgtggacggcgtggaggtgcataatgccaagacaaagccgcgggaggagcagtacaacagcacgtaccgtgtggtcagc
gtcctcaccgtcctgcaccaggactggctgaatggcaaggagtacaagtgcaaggtctccaacaaagccctcccagcccccatcga
gaaaaccatctccaaagccaaagggcagccccgagaaccacaggtgtacaccctgcccccatcccgggatgagctgaccaagaa
ccaggtcagcctgacctgcctggtcaaaggcttctatcccagcgacatcgccgtggagtgggagagcaatgggcagccggagaac
aactacaagaccacgcctcccgtgctggactccgacggctccttcttcctctacagcaagctcaccgtggacaagagcaggtggca
gcaggggaacgtcttctcatgctccgtgatgcatgaggctctgcacaaccactacacgcagaagagcctctccctgtctccgggtaa
agcggatccttcgaacatggacttcagcagaaatctttatgatattggggaacaactggacagtgaagatctggcctccctcaagttcc
tgagcctggactacattccgcaaaggaagcaagaacccatcaaggatgccttgatgttattccagagactccaggaaaagagaatgt
tggaggaaagcaatctgtccttcctgaaggagctgctcttccgaattaatagactggatttgctgattacctacctaaacactagaaagg
aggagatggaaagggaacttcagacaccaggcagggctcaaatttctgcctacagggtcatgctctatcagatttcagaagaagtga
gcagatcagaattgaggtcttttaagtttcttttgcaagaggaaatctccaaatgcaaactggatgatgacatgaacctgctggatattttc
atagagatggagaagagggtcatcctgggagaaggaaagttggacatcctgaaaagagtctgtgcccaaatcaacaagagcctgct
gaagataatcaacgactatgaagaattcagcaaagagagaagcagcagccttgaaggaagtcctgatgaattttcaaatggggagg
agttgtgtggggtaatgacaatctcggactctccaagagaacaggatagtgaatcacagactttggacaaagtttaccaaatgaaaag
caaacctcggggatactgtctgatcatcaacaatcacaattttgcaaaagcacgggagaaagtgcccaaacttcacagcattaggga
caggaatggaacacacttggatgcaggggctttgaccacgacctttgaagagcttcattttgagatcaagccccacgatgactgcaca
gtagagcaaatctatgagattttgaaaatctaccaactcatggaccacagtaacatggactgcttcatctgctgtatcctctcccatggag
acaagggcatcatctatggcactgatggacaggaggcccccatctatgagctgacatctcagttcactggtttgaagtgcccttccctt
gctggaaaacccaaagtgttttttattcaggcttgtcagggggataactaccagaaaggtatacctgttgagactgattcagaggagca
accctatttagaaatggatttatcatcacctcaaacgagatatatcccggatgaggctgactttctgctggggatggccactgtgaataa
ctgtgtttcctaccgaaaccctgcagagggaacctggtacatccagtcactttgccagagcctgagagagcgatgtcctcgaggcga
tgatattctcaccatcctgactgaagtgaactatgaagtaagcaacaaggatgacaagaaaaacatggggaaacagatgcctcagcc
tactttcacactaagaaaaaaacttgtcttcccttctgattgagcatgcatcgataa
Amino acid sequence:
mdfqvqifsfllisasvimsrgvdivltqspttiaaspgekvtitcrasssvsymywyqqksgaspklwiydtsklasgvpnrfsg
sgsgtsyslaintmetedaatyycqqwsstpltfgsgtkleikrggggsggggsggggsqvqlkeagpglvqptqtlsltctvsgfs
ltsdgvhwirqppgkglewmgiiyydggtdynsaiksrlsisrdtsksqvflkinslqtddtamyycarihfdywgqgvmvtv
ssdlepkssdkthtsppspapellggssvflfppkpkdtlmisrtpevtcvvvdvshedpevkfnwyvdgvevhnaktkpree
qynstyrvvsvltvlhqdwlngkeykckvsnkalpapiektiskakgqprepqvytlppsrdeltknqvsltclvkgfypsdiav
ewesngqpennykttppvldsdgsfflyskltvdksrwqqgnvfscsvmhealhnhytqkslslspgkadpsnmdfsrnlydi
geqldsedlaslkflsldyipqrkqepikdalmlfqrlqekrmleesnlsflkellfrinrldllitylntrkeemerelqtpgraqisay
rvmlyqiseevsrselrsfkfllqeeiskckldddmnlldifiemekrvilgegkldilkrvcaqinksllkiindyeefskersssle
gspdefsngeelcgvmtisdspreqdsesqtldkvyqmkskprgycliinnhnfakarekvpklhsirdrngthldagalttffee
lhfeikphddctveqiyeilkiyqlmdhsnmdcficcilshgdkgiiygtdgqeapiyeltsqftglkcpslagkpkvffiqacqg
dnyqkgipvetdseeqpylemdlsspqtryipdeadfllgmatvnncvsyrnpaegtwyiqslcqslrercprgddiltiltevny
evsnkddkknmgkqmpqptftlrkklvfpsd
144.
145. hCTLA4 IgAH IgACH2CH3
Nucleotide sequence:
atggcttgccttggatttcagcggcacaaggctcagctgaacctggctgccaggacctggccctgcactctcctgttttttcttctcttcat
ccctgtcttctgcaaagcaatgcacgtggcccagcctgctgtggtactggccagcagccgaggcatcgccagctttgtgtgtgagtat
gcatctccaggcaaagccactgaggtccgggtgacagtgcttcggcaggctgacagccaggtgactgaagtctgtgcggcaacct
acatgacggggaatgagttgaccttcctagatgattccatctgcacgggcacctccagtggaaatcaagtgaacctcactatccaagg
actgagggccatggacacgggactctacatctgcaaggtggagctcatgtacccaccgccatactacctgggcataggcaacggaa
cccagatttatgtaattgatccagaaccgtgcccagattctgatcagccagttccctcaactccacctaccccatctccctcaactccac
ctaccccatctccctcatgctgccacccccgactgtcactgcaccgaccggccctcgaggacctgctcttaggttcagaagcgatcct
cacgtgcacactgaccggcctgagagatgcctcaggtgtcaccttcacctggacgccctcaagtgggaagagcgctgttcaaggac
cacctgaccgtgacctctgtggctgctacagcgtgtccagtgtcctgccgggctgtgccgagccatggaaccatgggaagaccttca
cttgcactgctgcctaccccgagtccaagaccccgctaaccgccaccctctcaaaatccggaaacacattccggcccgaggtccac
ctgctgccgccgccgtcggaggagctggccctgaacgagctggtgacgctgacgtgcctggcacgtggcttcagccccaaggatg
tgctggttcgctggctgcaggggtcacaggagctgccccgcgagaagtacctgacttgggcatcccggcaggagcccagccagg
gcaccaccaccttcgctgtgaccagcatactgcgcgtggcagccgaggactggaagaagggggacaccttctcctgcatggtggg
ccacgaggccctgccgctggccttcacacagaagaccatcgaccgcttggcgggtaaacccacccatgtcaatgtgtctgttgtcat
ggcggaggtggacggcacctgctactgataatctaga
Amino acid sequence:
[sequence omitted]
146. hCTLA4 IgA WH WCH2 T4CH3 (hCTLA4 IgAH IgACH2CH3)
Nucleotide sequence:
atggcttgccttggatttcagcggcacaaggctcagctgaacctggctgccaggacctggccctgcactctcctgttttttcttctcttcat
ccctgtcttctgcaaagcaatgcacgtggcccagcctgctgtggtactggccagcagccgaggcatcgccagctttgtgtgtgagtat
gcatctccaggcaaagccactgaggtccgggtgacagtgcttcggcaggctgacagccaggtgactgaagtctgtgcggcaacct
acatgacggggaatgagttgaccttcctagatgattccatctgcacgggcacctccagtggaaatcaagtgaacctcactatccaagg
actgagggccatggacacgggactctacatctgcaaggtggagctcatgtacccaccgccatactacctgggcataggcaacggaa
cccagatttatgtaattgatccagaaccgtgcccagattctgatcagccagttccctcaactccacctaccccatctccctcaactccac
ctaccccatctccctcatgctgccacccccgactgtcactgcaccgaccggccctcgaggacctgctcttaggttcagaagcgatcct
cacgtgcacactgaccggcctgagagatgcctcaggtgtcaccttcacctggacgccctcaagtgggaagagcgctgttcaaggac
cacctgaccgtgacctctgtggctgctacagcgtgtccagtgtcctgccgggctgtgccgagccatggaaccatgggaagaccttca
cttgcactgctgcctaccccgagtccaagaccccgctaaccgccaccctctcaaaatccggaaacacattccggcccgaggtccac
ctgctgccgccgccgtcggaggagctggccctgaacgagctggtgacgctgacgtgcctggcacgtggcttcagccccaaggatg
tgctggttcgctggctgcaggggtcacaggagctgccccgcgagaagtacctgacttgggcatcccggcaggagcccagccagg
gcaccaccaccttcgctgtgaccagcatactgcgcgtggcagccgaggactggaagaagggggacaccttctcctgcatggtggg
ccacgaggccctgccgctggccttcacacagaagaccatcgaccgcttggcgggtaaacccacccatgtcaatgtgtctgttgtcat
ggcggaggtggactgataatctaga
Amino acid sequence:
Maclgfqrhkaqlnlaartwpctllffllfipvfckamhvaqpavvlassrgiasfvceyaspgkatevrvtvlrqadsqvtevca
atymtgneltflddsictgtssgnqvnltiqglramdtglyickvelmypppyylgigngtqiyvidpepcpdsdqpvpstpptp
spstpptpspscchprlslhrpaledlllgseailtctltglrdasgvtftwtpssgksavqgppdrdlcgcysvssvlpgcaepwnh
gktftctaaypesktpltaflsksgntfrpevhllpppseelalnelvtltclargfspkdvlvrwlqgsqelprekyltwasrqepsq
gtttfavtsilrvaaedwkkgdtfscmvghealplaftqktidrlagkpthvnvsvvmaevd
147. hIGA WH WCH2 T18CH3
Nucleotide sequence:
Tgatcagccagttccctcaactccacctaccccatctccctcaactccacctaccccatctccctcatgctgccacccccgactgtcac
tgcaccgaccggccctcgaggacctgctcttaggttcagaagcgatcctcacgtgcacactgaccggcctgagagatgcctcaggt
gtcaccttcacctggacgccctcaagtgggaagagcgctgttcaaggaccacctgaccgtgacctctgtggctgctacagcgtgtcc
agtgtcctgccgggctgtgccgagccatggaaccatgggaagaccttcacttgcactgctgcctaccccgagtccaagaccccgct
aaccgccaccctctcaaaatccggaaacacattccggcccgaggtccacctgctgccgccgccgtcggaggagctggccctgaac
gagctggtgacgctgacgtgcctggcacgtggcttcagccccaaggatgtgctggttcgctggctgcaggggtcacaggagctgc
cccgcgagaagtacctgacttgggcatcccggcaggagcccagccagggcaccaccaccttcgctgtgaccagcatactgcgcgt
ggcagccgaggactggaagaagggggacaccttctcctgcatggtgggccacgaggccctgccgctggccttcacacagaagac
catcgaccgcttggcgggtaaatgataatctaga
Amino acid sequence:
dqpvpstpptpspstpptpspscchprlslhrpaledlllgseailtctltglrdasgvtftwtpssgksavqgppdrdlcgcysvssv
lpgcaepwnhgktftctaaypesktpltatlsksgntfrpevhllpppseelalnelvtltclargfspkdvlvrwlqgsqelprekyl
twasrqepsqgtttfavtsilrvaaedwkkgdtfscmvghealplaftqktidrlagk
148. 2h7 scFv IgA WH WCH2 T4CH3
Nucleotide sequence:
aagcttgccgccatggattttcaagtgcagattttcagcttcctgctaatcagtgcttcagtcataattgccagaggacaaattgttctctc
ccagtctccagcaatcctgtctgcatctccaggggagaaggtcacaatgacttgcagggccagctcaagtgtaagttacatgcactgg
taccagcagaagccaggatcctcccccaaaccctggatttatgccccatccaacctggcttctggagtccctgctcgcttcagtggca
gtgggtctgggacctcttactctctcacaatcagcagagtggaggctgaagatgctgccacttattactgccagcagtggagttttaac
ccacccacgttcggtgctgggaccaagctggagctgaaagatggcggtggctcgggcggtggtggatctggaggaggtgggagc
tctcaggcttatctacagcagtctggggctgagctggtgaggcctggggcctcagtgaagatgtcctgcaaggcttctggctacacat
ttaccagttacaatatgcactgggtaaagcagacacctagacagggcctggaatggattggagctatttatccaggaaatggtgatact
tcctacaatcagaagttcaagggcaaggccacactgactgtagacaaatcctccagcacagcctacatgcagctcagcagcctgac
atctgaagactctgcggtctatttctgtgcaagagtggtgtactatagtaactcttactggtacttcgatgtctggggcacagggaccac
ggtcaccgtctcttctgatcagccagttccctcaactccacctaccccatctccctcaactccacctaccccatctccctcatgctgccac
ccccgactgtcactgcaccgaccggccctcgaggacctgctcttaggttcagaagcgatcctcacgtgcacactgaccggcctgag
agatgcctcaggtgtcaccttcacctggacgccctcaagtgggaagagcgctgttcaaggaccacctgaccgtgacctctgtggctg
ctacagcgtgtccagtgtcctgccgggctgtgccgagccatggaaccatgggaagaccttcacttgcactgctgcctaccccgagtc
caagaccccgctaaccgccaccctctcaaaatccggaaacacattccggcccgaggtccacctgctgccgccgccgtcggaggag
ctggccctgaacgagctggtgacgctgacgtgcctggcacgtggcttcagccccaaggatgtgctggttcgctggctgcaggggtc
acaggagctgccccgcgagaagtacctgacttgggcatcccggcaggagcccagccagggcaccaccaccttcgctgtgaccag
catactgcgcgtggcagccgaggactggaagaagggggacaccttctcctgcatggtgggccacgaggccctgccgctggccttc
acacagaagaccatcgaccgcttggcgggtaaacccacccatgtcaatgtgtctgttgtcatggcggaggtggactgataatctaga
Amino acid sequence:
mdfqvqifsfllisasviiargqivlsqspailsaspgekvtmtcrasssvsymhwyqqkpgsspkpwiyapsnlasgvparfsg
sgsgtsysltisrveaedaatyycqqwsfnpptfgagtklelkdgggsggggsggggssqaylqqsgaelvrpgasvkmsckas
gytftsynmhwvkqtprqglewigaiypgngdtsynqkfkgkatltvdkssstaymqlssltsedsavyfcarvvyysnsywy
fdvwgtgttvtvssdqpvpstpptpspstpptpspscchprlslhrpaledlllgseailtctltglrdasgvtftwtpssgksavqgp
pdrdlcgcysvssvlpgcaepwnhgktftctaaypesktpltatlsksgntfrpevhllpppseelalnelvtltclargfspkdvlvr
wlqgsqelprekyltwasrqepsqgtttfavtsilrvaaedwkkgdtfscmvghealplaftqktidrlagkpthvnvsvvmaev
d
149. 2H7 scFv IgA WH WCH2 T18CH3
Nucleotide sequence
aagctlgccgccatggattttcaagtgcagattttcagcttcctgctaatcagtgcttcagtcataattgccagaggacaaattgttctctc
ccagtctccagcaatcctgtctgcatctccaggggagaaggtcacaatgacttgcagggccagctcaagtgtaagttacatgcactgg
taccagcagaagccaggatcctcccccaaaccctggatttatgccccatccaacctggcttctggagtccctgctcgcttcagtggca
gtgggtctgggacctcttactctctcacaatcagcagagtggaggctgaagatgctgccacttattactgccagcagtggagttttaac
ccacccacgttcggtgctgggaccaagctggagctgaaagatggcggtggctcgggcggtggtggatctggaggaggtgggagc
tctcaggcttatctacagcagtctggggctgagctggtgaggcctggggcctcagtgaagatgtcctgcaaggcttctggctacacat
ttaccagttacaatatgcactgggtaaagcagacacctagacagggcctggaatggattggagctatttatccaggaaatggtgatact
tcctacaatcagaagttcaagggcaaggccacactgactgtagacaaatcctccagcacagcctacatgcagctcagcagcctgac
atctgaagactctgcggtctatttctgtgcaagagtggtgtactatagtaactcttactggtacttcgatgtctggggcacagggaccac
ggtcaccgtctcttctgatcagccagttccctcaactccacctaccccatctccctcaactccacctaccccatctccctcatgctgccac
ccccgactgtcactgcaccgaccggccctcgaggacctgctcttaggttcagaagcgatcctcacgtgcacactgaccggcctgag
agatgcctcaggtgtcaccttcacctggacgccctcaagtgggaagagcgctgttcaaggaccacctgaccgtgacctctgtggctg
ctacagcgtgtccagtgtcctgccgggctgtgccgagccatggaaccatgggaagaccttcacttgcactgctgcctaccccgagtc
caagaccccgctaaccgccaccctctcaaaatccggaaacacattccggcccgaggtccacctgctgccgccgccgtcggaggag
ctggccctgaacgagctggtgacgctgacgtgcctggcacgtggcttcagccccaaggatgtgctggttcgctggctgcaggggtc
acaggagctgccccgcgagaagtacctgacttgggcatcccggcaggagcccagccagggcaccaccaccttcgctgtgaccag
catactgcgcgtggcagccgaggactggaagaagggggacaccttctcctgcatggtgggccacgaggccctgccgctggccttc
acacagaagaccatcgaccgcttggcgggtaaatgataatctaga
Amino acid sequence:
mdfqvqifsfllisasviiargqivlsqspailsaspgekvtmtcrasssvsymhwyqqkpgsspkpwiyapsnlasgvparfsg
sgsgtsysltisrveaedaatyycqqwsfnpptfgagtklelkdgggsggggsggggssqaylqqsgaelvrpgasvkmsckas
gytftsynmhwvkqtprqglewigaiypgngdtsynqkfkgkatltvdkssstaymqlssltsedsavyfcarvvyysnsywy
fdvwgtgttvtvssdqpvpstpptpspstpptpspscchprlslhrpaledlllgseailtctltglrdasgvtftwtpssgksavqgp
pdrdlcgcysvssvlpgcaepwnhgktftctaaypesktpltatlsksgntfrpevhllpppseelalnelvtltclargfspkdvlvr
wlqgsqelprekyltwasrqepsqgtttfavtsilrvaaedwkkgdtfscmvghealplaftqktidrlagk
150. G19-4 scFv (SSS-P)WH WCH2 WCH3-hCD80TMCT
Nucleotide sequence:
aagcttatggattttcaagtgcagattttcagcttcctgctaatcagtgcttcagtcataatgtccagaggagtcgacatccagatgacac
agactacatcctccctgtctgcctctctgggagacagagtcaccatcagttgcagggcaagtcaggacattcgcaattatttaaactgg
tatcagcagaaaccagatggaactgttaaactcctgatctactacacatcaagattacactcaggagtcccatcaaggttcagtggcag
tgggtctggaacagattauctctcaccattgccaacctgcaaccagaagatattgccacttacttttgccaacagggtaatacgcttccg
tggacgttcggtggaggcaccaaactggtaaccaaacgggagctcggtggcggtggctcgggcggtggtgggtcgggtggcgg
cggatctatcgatgaggtccagctgcaacagtctggacctgaactggtgaagcctggagcttcaatgtcctgcaaggcctctggttac
tcattcactggctacatcgtgaactggctgaagcagagccatggaaagaaccttgagtggattggacttattaatccatacaaaggtctt
actacctacaaccagaaattcaagggcaaggccacattaactgtagacaagtcatccagcacagcctacatggagctcctcagtctg
acatctgaagactctgcagtctattactgtgcaagatctgggtactatggtgactcggactggtacttcgatgtctggggcgcagggac
cacggtcaccgtctcctctgatctggagcccaaatcttctgacaaaactcacacatccccaccgtccccagcacctgaactcctgggg
ggaccgtcagtcttcctcttccccccaaaacccaaggacaccctcatgatctcccggacccctgaggtcacatgcgtggtggtggac
gtgagccacgaagaccctgaggtcaagttcaactggtacgtggacggcgtggaggtgcataatgccaagacaaagccgcgggag
gagcagtacaacagcacgtaccgtgtggtcagcgtcctcaccgtcctgcaccaggactggctgaatggcaaggagtacaagtgca
aggtctccaacaaagccctcccagcccccatcgagaaaaccatctccaaagccaaagggcagccccgagaaccacaggtgtaca
ccctgcccccatcccgggatgagctgaccaagaaccaggtcagcctgacctgcctggtcaaaggcttctatcccagcgacatcgcc
gtggagtgggagagcaatgggcagccggagaacaactacaagaccacgcctcccgtgctggactccgacggctccttcttcctcta
cagcaagctcaccgtggacaagagcaggtggcagcaggggaacgtcttctcatgctccgtgatgcatgaggctctgcacaaccact
acacgcagaagagcctctccctgtctccgggtaaagcggatccttcgaacctgctcccatcctgggccattaccttaatctcagtaaat
ggaatttttgtgatatgctgcctgacctactgctttgccccaagatgcagagagagaaggaggaatgagagattgagaagggaaagt
gtacgccctgtataaatcgat
Amino acid sequence:
mdfqvqifsfllisasvimsrgvdiqmtqttsslsaslgdrvtiscrasqdirnylnwyqqkpdgtvklliyytsrlhsgvpsrfsgs
gsgtdysltianlqpediatyfcqqgntlpwtfgggtklvtkrelggggsggggsggggsidevqlqqsgpelvkpgasmsckas
gysftgyivnwlkqshgknlewiglinpykglttynqkfkgkatltvdkssstaymellsltsedsavyycarsgyygdsdwyf
dvwgagttvtvssdlepkssdkthtsppspapellggpsvflfppkpkdtlmisrtpevtcvvvdvshedpevkfnwyvdgve
vhnaktkpreeqynstyrvvsvltvlhqdwlngkeykckvsnkalpapiektiskakgqprepqvytlppsrdeltknqvsltcl
vkgfypsdiavewesngqpennykttppvldsdgsfflyskltvdksrwqqgnvfscsvmhealhnhytqkslslspgkadps
nllpswaitlisvngifviccltycfaprcrerrrnerlrresvrpv
151. 2e12 scFv (CCC-P)WH WCH2 WCH3-hCD80TM/CT
Nucleotide sequence:
aagcttatggattttcaagtgcagattttcagcttcctgctaatcagtgcttcagtcataatgtccagaggagtcgacattgtgctcaccca
atctccagcttctttggctgtgtctctaggtcagagagccaccatctcctgcagagccagtgaaagtgttgaatattatgtcacaagttta
atgcagtggtaccaacagaaaccaggacagccacccaaactcctcatctctgctgcatccaacgtagaatctggggtccctgccagg
tttagtggcagtgggtctgggacagacttcagcctcaacatccatcctgtggaggaggatgatattgcaatgtatttctgtcagcaaagt
aggaaggttccttggacgttcggtggaggcaccaagctggaaatcaaacggggtggcggtggctcgggcggaggtgggtcgggt
ggcggcggatctcaggtgcagctgaaggagtcaggacctggcctggtggcgccctcacagagcctgtccatcacatgcaccgtct
cagggttctcattaaccggctatggtgtaaactgggttcgccagcctccaggaaagggtctggagtggctgggaatgatatggggtg
atggaagcacagactataattcagctctcaaatccagactgagcatcaccaaggacaactccaagagccaagttttcttaaaaatgaa
cagtctgcaaactgatgacacagccagatactactgtgccagagatggttatagtaactttcattactatgttatggactactggggtcaa
ggaacctcagtcaccgtctcctcagatctggagcccaaatcttgtgacaaaactcacacatgcccaccgtgcccagcacctgaactc
ctggggggaccgtcagtcttcctcttccccccaaaacccaaggacaccctcatgatctcccggacccctgaggtcacatgcgtggtg
gtggacgtgagccacgaagaccctgaggtcaagttcaactggtacgtggacggcgtggaggtgcataatgccaagacaaagccgc
gggaggagcagtacaacagcacgtaccgtgtggtcagcgtcctcaccgtcctgcaccaggactggctgaatggcaaggagtacaa
gtgcaaggtctccaacaaagccctcccagcccccatcgagaaaaccatctccaaagccaaagggcagccccgagaaccacaggt
gtacaccctgcccccatcccgggatgagctgaccaagaaccaggtcagcctgacctgcctggtcaaaggcttctatcccagcgaca
tcgccgtggagtgggagagcaatgggcagccggagaacaactacaagaccacgcctcccgtgctggactccgacggctccttctt
cctctacagcaagctcaccgtggacaagagcaggtggcagcaggggaacgtcttctcatgctccgtgatgcatgaggctctgcaca
accactacacgcagaagagcctctccctgtctccgggtaaagcggatccttcgaacctgctcccatcctgggccattaccttaatctca
gtaaatggaatttttgtgatatgctgcctgacctactgctttgccccaagatgcagagagagaaggaggaatgagagattgagaaggg
aaagtgtacgccctgtataaatcgat
Amino acid sequence:
mdfqvqifsfllisasvimsrgvdivltqspaslavslgqratiscrasesveyyvtslmqwyqqkpgqppkllisaasnvesgvp
arfsgsgsgtdfslnihpveeddiamyfcqqsrkvpwtfgggtkleikrggggsggggsggggsqvqlkesgpglvapsqslsit
ctvsgfsltgygvnwvrqppgkglewlgmiwgdgstdynsalksrlsitkdnsksqvflkmnslqtddtaryycardgysnfh
yyvmdywgqgtsvtvssdlepkscdkthtcppcpapellggpsvflfppkpkdtlmisrtpevtcvvvdvshedpevkfnwy
vdgvevhnaktkpreeqynstyrvvsvltvlhqdwlngkeykckvsnkalpapiektiskakgqprepqvytlppsrdeltkn
qvsltclvkgfypsdiavewesngqpennykttppvldsdgsfflyskltvdksrwqqgnvfscsvmhealhnhytqkslslsp
gkadpsnllpswaitlisvngifviccltycfaprcrerrrnerlrresvrpv
1D8 scFv (SSS-P)H P238SCH2 WCH3-hCD80TM/CT
Nucleotide sequence:
aagcttatggattttcaagtgcagattttcagcttcctgctaatcagtgcttcagtcataatgtccagaggagtcgacattgtgctcactca
gtctccaacaaccatagctgcatctccaggggagaaggtcaccatcacctgccgtgccagctccagtgtaagttacatgtactggtac
cagcagaagtcaggcgcctcccctaaactctggatttatgacacatccaagctggcttctggagttccaaatcgcttcagtggcagtg
ggtctgggacctcttattctctcgcaatcaacaccatggagactgaagatgctgccacttattactgtcagcagtggagtagtactccgc
tcacgttcgggtctgggaccaagctggagatcaaacggggtggcggtggctcgggcggtggtgggtcgggtggcggcggatctc
aggtgcagctgaaggaggcaggacctggcctggtgcaaccgacacagaccctgtccctcacatgcactgtctctgggttctcattaa
ccagcgatggtgtacactggattcgacagcctccaggaaagggtctggaatggatgggaataatatattatgatggaggcacagatt
ataattcagcaattaaatccagactgagcatcagcagggacacctccaagagccaagttttcttaaaaatcaacagtctgcaaactgat
gacacagccatgtattactgtgccagaatccactttgattactggggccaaggagtcatggtcacagtctcctctgatctggagcccaa
atcttctgacaaaactcacacaagcccaccgagcccagcacctgaactcctggggggatcgtcagtcttcctcttccccccaaaaccc
aaggacaccctcatgatctcccggacccctgaggtcacatgcgtggtggtggacgtgagccacgaagaccctgaggtcaagttcaa
ctggtacgtggacggcgtggaggtgcataatgccaagacaaagccgcgggaggagcagtacaacagcacgtaccgtgtggtcag
cgtcctcaccgtcctgcaccaggactggctgaatggcaaggagtacaagtgcaaggtctccaacaaagccctcccagcccccatcg
agaaaaccatctccaaagccaaagggcagccccgagaaccacaggtgtacaccctgcccccatcccgggatgagctgaccaaga
accaggtcagcctgacctgcctggtcaaaggcttctatcccagcgacatcgccgtggagtgggagagcaatgggcagccggagaa
caactacaagaccacgcctcccgtgctggactccgacggctccttcttcctctacagcaagctcaccgtggacaagagcaggtggc
agcaggggaacgtcttctcatgctccgtgatgcatgaggctctgcacaaccactacacgcagaagagcctctccctgtctccgggta
aagcggatccttcgaacctgctcccatcctgggccattaccttaatctcagtaaatggaatttttgtgatatgctgcctgacctactgcttt
gccccaagatgcagagagagaaggaggaatgagagattgagaagggaaagtgtacgccctgtataaatcgata
Amino acid sequence:
Mdfqvqifsfllisasvimsrgvdivltqspttiaaspgekvtitcrasssvsymywyqqksgaspklwiydtsklasgvpnrfsg
sgsgtsyslaintmetedaatyycqqwsstpltfgsgtkleikrggggsggggsggggsqvqlkeagpglvqptqtlsltctvsgfs
ltsdgvhwirqppgkglewmgiiyydggtdynsaiksrlsisrdtsksqvflkinslqtddtamyycarihfdywgqgvmvtv
ssdlepkssdkthtsppspapellggssvflfppkpkdtlmisrtpevtcvvvdvshedpevkfnwyvdgvevhnaktkpree
qynstyrvvsvltvlhqdwlngkeykckvsnkalpapiektiskakgqprepqvytlppsrdeltknqvsltclvkgfypsdiav
ewesngqpennykttppvldsdgsfflyskltvdksrwqqgnvfscsvmhealhnhytqkslslspgkadpsnllpswaitlis
vngifviccltycfaprcrerrrnerlrresvrpv
HCD16lowFL + NL
Nucleotide sequence:
aagcttgccgccatgtggcagctgctcctcccaactgctctgctacttctagtttcagctggcatgcggactgaagatctcccaaaggc
tgtggtgttcctggagcctcaatggtacagggtgctcgagaaggacagtgtgactctgaagtgccagggagcctactcccctgagga
caattccacacagtggtttcacaatgagagcctcatctcaagccaggcctcgagctacttcattgacgctgccacagtcgacgacagt
ggagagtacaggtgccagacaaacctctccaccctcagtgacccggtgcagctagaagtccatatcggctggctgttgctccaggc
ccctcggtgggtgttcaaggaggaagaccctattcacctgaggtgtcacagctggaagaacactgctctgcataaggtcacatattta
cagaatggcaaaggcaggaagtattttcatcataattctgacttctacattccaaaagccacactcaaagacagcggctcctacttctgc
agggggcttgttgggagtaaaaatgtgtcttcagagactgtgaacatcaccatcactcaaggtttggcagtgtcaaccatctcatcattc
tttccacctgggtaccaagtctctttctgcttggtgatggtactcctttttgcagtggacacaggactatatttctctgtgaagacaaacatt
cgaagctcaacaagagactggaaggaccataaatttaaatggagaaaggaccctcaagacaaatgaccc
Amino acid sequence:
mwqlllptallllvsagmrtedlpkavvflepqwyrvlekdsvtlkcqgayspednstqwfhneslissqassyfidaatvddsg
eyrcqtnlstlsdpvqlevhigwlllqaprwvfkeedpihlrchswkntalhkvtylqngkgrkyfhhnsdfyipkatlkdsgsyf
crglvgsknvssetvnititqglavstissffppgyqvsfclvmvllfavdtglyfsvktnirsstrdwkdhkfkwrkdpqdk

[0862] From the foregoing, it will be appreciated that, although specific embodiments of the invention have been described herein for the purpose of illustration, various modifications may be made without deviating from the spirit and scope of the invention. Accordingly, the present invention is not limited except as by the appended claims.

[0863] All patents, patent applications, publications, scientific articles, web sites, and other documents and materials referenced or mentioned herein are indicative of the levels of skill of those skilled in the art to which the invention pertains, and each such referenced document and material is hereby incorporated by reference to the same extent as if it had been incorporated by reference in its entirety individually or set forth herein in its entirety. Additionally, all claims in this application, and all priority applications, including but not limited to original claims, are hereby incorporated in their entirety into, and form a part of, the written decription of the invention. Applicants reserve the right to physically incorporate into this specification any and all materials and information from any such patents, applications, publications, scientific articles, web sites, electronically available information, and other referenced materials or documents. Applicants reserve the right to physically incorporate into any part of this document, including any part of the written description, the claims referred to above including but not limited to any original claims.

[0864] The specific methods and compositions described herein are representative of preferred embodiments and are exemplary and not intended as limitations on the scope of the invention. Other objects, aspects, and embodiments will occur to those skilled in the art upon consideration of this specification, and are encompassed within the spirit of the invention as defined by the scope of the claims. It will be readily apparent to one skilled in the art that varying substitutions and modifications may be made to the invention disclosed herein without departing from the scope and spirit of the invention. The invention illustratively described herein suitably may be practiced in the absence of any element or elements, or limitation or limitations, which is not specifically disclosed herein as essential. Thus, for example, in each instance herein, in embodiments or examples of the present invention, any of the terms “comprising”, “consisting essentially of”, and “consisting of” may be replaced with either of the other two terms in the specification. Also, the terms “comprising ”, “including”, containing”, etc. are to be read expansively and without limitation. The methods and processes illustratively described herein suitably may be practiced in differing orders of steps, and that they are not necessarily restricted to the orders of steps indicated herein or in the claims. It is also that as used herein and in the appended claims, the singular forms “a,” “an,” and “the” include plural reference unless the context clearly dictates otherwise. Thus, for example, a reference to “a host cell” includes a plurality (for example, a culture or population) of such host cells, and so forth. Under no circumstances may the patent be interpreted to be limited to the specific examples or embodiments or methods specifically disclosed herein. Under no circumstances may the patent be interpreted to be limited by any statement made by any Examiner or any other official or employee of the Patent and Trademark Office unless such statement is specifically and without qualification or reservation expressly adopted in a responsive writing by Applicants.

[0865] The terms and expressions that have been employed are used as terms of description and not of limitation, and there is no intent in the use of such terms and expressions to exclude any equivalent of the features shown and described or portions thereof, but it is recognized that various modifications are possible within the scope of the invention as claimed. Thus, it will be understood that although the present invention has been specifically disclosed by preferred embodiments and optional features, modification and variation of the concepts herein disclosed may be resorted to by those skilled in the art, and that such modifications and variations are considered to be within the scope of this invention as defined by the appended claims.

[0866] The invention has been described broadly and generically herein. Each of the narrower species and subgeneric groupings falling within the generic disclosure also form part of the invention. This includes the generic description of the invention with a proviso or negative limitation removing any subject matter from the genus, regardless of whether or not the excised material is specifically recited herein.

[0867] Other embodiments are within the following claims. In addition, where features or aspects of the invention are described in terms of Markush groups, those skilled in the art will recognize that the invention is also thereby described in terms of any individual member or subgroup of members of the Markush group.

1. A non-naturally occurring single chain protein comprising: i) a first polypeptide having a binding domain polypeptide capable of binding to a target molecule, said binding domain polypeptide comprising a heavy chain variable region, said heavy chain variable region comprising an amino acid substitution or deletion at one or more amino acid residues; ii) a second polypeptide comprising a connecting region attached to said first polypeptide; and iii) a third polypeptide comprising an N-terminally truncated immunoglobulin heavy chain constant region polypeptide attached to the second polypeptide, wherein said non-naturally occurring single-chain protein is capable of at least one immunological activity.

2. A protein of claim 1 wherein said binding domain polypeptide is a single chain Fv.

3. A protein of claim 1 wherein the one or more amino acid substitution or deletion in said heavy chain variable region is effective to increase expression or stability of said protein relative to a protein without said deletion or substitution.

4. A protein of claim 1 wherein said binding domain polypeptide comprises an immunoglobulin light chain variable region polypeptide and an immunoglobulin heavy chain variable region polypeptide.

5. A protein of claim 4 further comprising a second binding domain polypeptide capable of binding a second target molecule, said second binding domain polypeptide comprising an immunoglobulin light chain variable region polypeptide and an immunoglobulin heavy chain variable region polypeptide.

6. A protein of claim 5 wherein the first target molecule and the second target molecule are different.

7. A protein of claim 5 wherein the first target molecule and the second target molecule are the same.

8. A protein of claim 1 wherein said binding domain polypeptide is a single chain Fv comprising one or more amino'acid substitution in positions 9, 10, 11, 12, 108, 110, 112 in said heavy chain variable region.

9. A protein of claim 1 wherein said binding domain polypeptide is a single chain Fv comprising an amino acid substitution at position 11 in said heavy chain variable region.

10. A protein of claim 9 wherein the amino acid substituted for the amino acid at position of 11 of the single chain Fv heavy chain variable region is selected from the group consisting of serine, threonine, cysteine, tyrosine, asparagine, glutamine, aspartic acid, glutamic acid, lysine, arginine, and histidine.

11. A protein of claim 9 wherein the amino acid substituted for the amino acid at position of 11 of the single chain Fv heavy chain variable region is selected from the group consisting of serine, threonine, cysteine, tyrosine, asparagine, and glutamine.

12. A protein of claim 9 where leucine is replaced by serine at position 11.

13. A protein of claim 9 where leucine is replaced by des-leucine at position 11.

14. A protein of claim 12 having an increased recombinant expression or stability relative to said protein not having an amino acid substitution at position 11.

15. A protein of claim 14 wherein the expression of said protein having an amino acid substitution at position 11 is 10-100 fold greater than said protein without a substitution at position 11.

16. A protein of claim 14 wherein said expression is in mammalian cells.

17. A protein of claim 1 wherein said binding domain polypeptide is a single chain Fv and the amino acid at position 11 of the heavy chain variable region of said single chain Fv has been deleted.

18. A protein of claim 1 wherein said binding domain polypeptide is a single chain Fv and said binding domain polypeptide comprises a light chain variable region, wherein said light chain variable region has an amino acid deletion or substitution at one or more of amino acid positions 12, 80, 81, 83, 105, 106, and 107.

19. A protein of claim 18 wherein the amino acid at position 106 has been substituted or deleted.

20. A protein of claim 2 wherein said binding domain polypeptide binds to a tumor antigen.

21. A protein of claim 2 wherein said binding domain polypeptide binds to an antigen on an immune effector cell.

22. A protein of claim 2 wherein said binding domain polypeptide binds to a cancer cell antigen.

23. A protein of claim 22 wherein said cancer cell antigen is a surface antigen.

24. A protein of claim 22 wherein said cancer cell antigen is an intracellular antigen.

25. A protein of claim 1 wherein said binding domain polypeptide binds to a B cell antigen.

26. A protein of claim 25 wherein said B cell antigen is selected from the group consisting of CD19, CD20, CD22, CD37, CD40, CD80, and CD86.

27. A protein of claim 2 wherein said single chain Fv binds to a B cell antigen.

28. A protein of claim 27 wherein said B cell antigen is selected from the group consisting of CD19, CD20, CD22, CD37, CD40, CD80, and CD86.

29. A protein of claim 28 wherein said single chain Fv is selected from the group consisting of HD37 single chain Fv, 2H7 single chain Fv, G28-1 single chain Fv, and 4.4.220 single chain Fv.

30. A protein of claim 2 wherein said single chain Fv is selected from the group consisting of HD37 single chain Fv, 2H7 single chain Fv, G28-1 single chain Fv, FC₂₋₂, UCHL-1, 5B9, L6, 10A8, 2e12, 40.2.36, G19-4, 1D8, and 4.4.220 single chain Fv.

31. A protein of claim 1 wherein said binding domain polypeptide is an scFv that binds to a B cell differentiation antigen.

32. A protein of claim 31 wherein said B cell antigen is selected from the group consisting of CD19, CD20, CD22, CD37, and CD40.

33. A protein of claim 1 wherein said binding domain polypeptide binds to a target selected from the group consisting of CD2, CD3, CD4, CD5, CD6, CD8, CD10, CD11b, CD14, CD19, CD20, CD21, CD22, CD23, CD24, CD25, CD28, CD30, CD37, CD40, CD43, CD50 (ICAM3), CD54 (ICAM1), CD56, CD69, CD80, CD86, CD134 (OX40), CD137 (41BB), CD152 (CTLA-4), CD153 (CD30 ligand), CD154 (CD40 ligand), ICOS, L6, B7-H1, and HLA class II.

34. A protein of claim 1 wherein said protein is capable of forming a complex comprising two or more of said proteins.

35. A protein of claim 34 wherein said complex is a dimer.

36. A protein of claim 1 wherein said protein is a monomer.

37. A protein of claim 1 coupled to a drug, toxin, immunomodulator, polypeptide effector, isotope, label, or effector moiety.

38. A protein of claim 1 wherein said immunological activity is selected from the group consisting of antibody dependent cell-mediated cytotoxicity, complement fixation, induction of apoptosis, induction of one or more biologically active signals, induction of one or more immune effector cells, activation of cellular differentiation, cellular activation, release of one or more biologically active molecules, and neutralization of an infectious agent or toxin.

39. A protein of claim 38 which is capable of induction of biologically active signals by activation or inhibition of one or more molecules selected from the group consisting of protein kinases, protein phosphatases, G-proteins, cyclic nucleotides or other second messengers, ion channels, and secretory pathway components.

40. A protein of claim 38 which is capable of induction of one or more immune effector cells selected from the group consisting of NK cells, monocytes, macrophages, B cells, T cells, mast cells, neutrophils, eosinophils, and basophils.

41. A protein of claim 40 wherein said induction of one or more immune effector cells leads to antibody dependent cell-mediated cytotoxicity or the release of one or more biologically active molecules.

42. A protein of claim 38 which is capable of cellular activation, wherein said activation leads to changes in cellular transcriptional activity.

43. A protein of claim 42 wherein said cellular transcriptional activity is increased.

44. A protein of claim 42 wherein said cellular transcriptional activity is decreased.

45. A protein of claim 38 wherein said one or more biologically active molecules is a protease.

46. A protein of claim 38 wherein said one or more biologically active molecules is a cytokine.

47. A protein of claim 46 wherein said cytokine is selected from the group consisting of monokines, lymphokines, chemokines, growth factors, colony stimulating factors, interferons, and interleukins.

48. A protein of claim 38 which is capable of neutralization of an infectious agent, wherein said infectious agent is a bacterium, a virus, a parasite, or a fungus.

49. A protein of claim 38 which is capable of neutralization of a toxin, wherein said toxin is selected from the group consisting of endotoxins and exotoxins.

50. A protein of claim 38 which is capable of neutralization of a toxin, wherein said toxin is an exotoxin selected from the group consisting of anthrax toxin, cholera toxin, diphtheria toxin, pertussis toxin, E. coli heat-labile toxin LT, E. coli heat stable toxin ST, shiga toxin Pseudomonas Exotoxin A, botulinum toxin, tetanus toxin, Bordetella pertussis AC toxin, and Bacillus anthracis EF.

51. A protein of claim 38 which is capable of neutralization of a toxin, wherein said toxin is an endotoxin selected from the group consisting of saxitoxins, tetrodotoxin, mushroom toxins, aflatoxins, pyrrolizidine alkaloids, phytohemagglutinins, and grayanotoxins.

52. A protein of claim 1 wherein said protein is capable of binding to an intracellular target to effect a cellular function.

53. A protein of claim 1 wherein said binding domain polypeptide comprises a light chain variable region attached to said heavy chain variable region by a binding domain linker, wherein said binding domain linker comprises one or more peptide having a sequence Gly-Gly-Gly-Gly-Ser.

54. A protein of claim 53 comprising three Gly-Gly-Gly-Gly-Ser peptides.

55. A protein of claim 1 wherein said binding domain polypeptide comprises wild type or engineered immunoglobulin variable region obtained from species selected from the group consisting of human, murine, rat, pig, and monkey.

56. A protein of claim 1 wherein said binding domain polypeptide comprises a humanized immunoglobulin variable region.

57. A protein of claim 2 wherein said N-terminally truncated immunoglobulin heavy chain constant region polypeptide comprises an IgG CH2 constant region polypeptide attached to an immunoglobulin heavy chain IgG CH3 constant region polypeptide.

58. A protein of claim 2 wherein said N-terminally truncated immunoglobulin heavy chain constant region polypeptide consist essentially of an IgG CH2 constant region polypeptide attached to an immunoglobulin heavy chain IgG CH3 constant region polypeptide.

59. A protein of claim 2 wherein said N-terminally truncated immunoglobulin heavy chain constant region polypeptide comprises an IgG CH2 constant region polypeptide attached to an immunoglobulin heavy chain IgG CH3 constant region polypeptide.

60. A protein of claim 2 wherein said N-terminally truncated immunoglobulin heavy chain constant region polypeptide consist essentially of an IgG CH2 constant region polypeptide attached to an immunoglobulin heavy chain IgG CH3 constant region polypeptide.

61. A protein of claim 1 wherein said binding domain polypeptide is a single chain Fv that comprises at least a portion of a human constant region.

62. A protein of claim 2 wherein said binding domain polypeptide is a single chain Fv that comprises at least a portion of a human constant region.

63. A protein of claim 1 wherein said connecting region comprises a naturally occurring hinge region selected from the group consisting of a human hinge or portion thereof, human IgG hinge or a portion thereof, human IgA hinge or a portion thereof, human IgE hinge or a portion thereof, camelid hinge region or a portion thereof, IgG1 llama hinge region or portion thereof, nurse shark hinge region or portion thereof, and spotted ratfish hinge region or a portion thereof.

64. A protein of claim 1 wherein said connecting region comprises a human IgE hinge or a portion thereof.

65. A protein of claim 1 wherein said connecting region comprises a human IgG1, IgG2, IgG3 or IgG4 hinge region having either zero or one cysteine residue.

66. A protein of claim 1 wherein said connecting region comprises a human IgGA hinge region having between zero and two cysteine residues.

67. A protein of claim 1 wherein said connecting region comprises a wild type human IgG1 immunoglobulin hinge region.

68. A protein of claim 1 wherein said connecting region comprises a glycosylation site.

69. A protein of claim 1 wherein said connecting region has no cysteine residues capable of forming disulfide bonds.

70. A protein of claim 1 wherein said connecting region has one cysteine residue.

71. A protein of claim 1 wherein said connecting region comprises a mutated wild-type immunoglobulin hinge region polypeptide comprising no more than one cysteine residue.

72. A protein of claim 1 wherein said connecting region is altered so that said protein has a reduced ability to dimerize.

73. A protein of claim 1 where said connecting region comprises three cysteine residues and one proline residue, wherein one or more of said cysteine residues is deleted or substituted and said proline reside is substituted or deleted.

74. A protein of claim 1 wherein said connecting region comprises a mutated wild-type immunoglobulin hinge region polypeptide comprising first, second, and third cysteine residues, where said first cysteine reside is N-terminal to said second cysteine and said second cysteine is N-terminal to said third cysteine, wherein said first cysteine residue is substituted or deleted.

75. A protein of claim 74 wherein said wild-type hinge region polypeptide is from human IgG1.

76. A non-naturally occurring single chain protein comprising: i) a first polypeptide having a binding domain polypeptide capable of binding to a target molecule, said binding domain polypeptide comprising a heavy chain variable region comprising one or more amino acid deletion or substitution in positions 9, 10, 11, 12, 108, 110, 112; ii) a second polypeptide comprising a connecting region attached to said first polypeptide; and iii) a third polypeptide comprising an N-terminally truncated immunoglobulin heavy chain constant region polypeptide attached to the second polypeptide, wherein said non-naturally occurring single-chain protein is capable of at least one immunological activity.

77. A non-naturally occurring single chain Fv protein comprising: i) a first polypeptide having a binding domain polypeptide capable of binding to a target molecule, said binding domain polypeptide comprising a heavy chain variable region wherein leucine is replaced by serine at position 11 in the first framework region of the heavy chain variable region; ii) a second polypeptide comprising a connecting region attached to said first polypeptide; and iii) a third polypeptide comprising an N-terminally truncated immunoglobulin heavy chain constant region polypeptide attached to the second polypeptide, wherein said non-naturally occurring single-chain protein is capable of at least one immunological activity.

78. A protein of claim 77 further comprising a substitution or deletion of the amino acid at position 10 in the first framework region of the heavy chain variable region.

79. A protein of claim 77 wherein the amino acid substitution at position 11 is effective to increase expression or stability of said single chain Fv protein relative to a single chain Fv protein without said deletion or substitution.

80. A protein of claim 77 wherein the numbering of the residues is the EU index according to Kabat.

81. A protein of claim 77 wherein said connecting region comprises a proline and first, second, and third cysteine residues, where said first cysteine reside is N-terminal to said second cysteine and said second cysteine is N-terminal to said third cysteine, said third cysteine residue is N-terminal to said proline residue.

82. A protein of claim 77 wherein said connecting region comprises an IgA hinge region or portion thereof.

83. A protein of claim 81 where said single chain protein comprises a single chain Fv binding domain from a 2H7 hybridoma, wherein said second cysteine residue is replaced by serine and said proline residue is replaced by serine in the connecting region, and said heavy chain constant region comprises CH2 and CH3 domains from IgG₁.

84. A protein of claim 82 wherein said single chain protein comprises a single chain Fv binding domain from a 2H7 hybridoma, said connecting region comprises a murine IgA hinge or portion thereof, and said heavy chain constant region comprises CH2 and CH3 domains from murine IgA, wherein said CH3 comprises a deletion or substitution in four amino acids that render the IgA heavy chain constant region incapable of associating with a J chain polypeptide.

85. A protein of claim 81 where said single chain protein comprises a 2H7 single chain Fv binding domain, wherein said first, second, and third cysteine residues in the connecting region are replaced by serine and said proline residue in the connecting region is replaced by serine, said heavy chain constant region comprising CH2 and CH3 domains from IgG₁ wherein lysine is replaced by serine at position 322 in said CH2 region.

86. A protein of claim 81 where said single chain protein comprises a single chain Fv binding domain from a 2H7 hybridoma, wherein in the connecting region said second and third cysteine residues are replaced by serine and said proline residue is replaced by serine, said heavy chain constant region comprising CH2 and CH3 domains from IgG, wherein lysine is replaced by serine at position 322 in said CH2 region.

87. A protein of claim 81 where said single chain protein comprises a single chain Fv binding domain from a 2H7 hybridoma, wherein in the connecting region said first, second, and third cysteine residues are replaced by serine and said proline residue is replaced by serine, said heavy chain constant region comprising CH2 and CH3 domains from IgG, wherein proline is replaced by serine at position 331 in said CH2 region.

88. A protein of claim 81 where said single chain protein comprises a single chain Fv binding domain from a 2H7 hybridoma, wherein in the connecting region said second and third cysteine residues are replaced by serine and said proline residue is replaced by serine, said heavy chain constant region comprising CH2 and CH3 domains from IgG₁ wherein proline is replaced by serine at position 331 in said CH2 region.

89. A protein of claim 81 where said single chain protein comprises a 2H7 single chain Fv binding domain, wherein in the connecting region said first, second, and third cysteine residues are replaced by serine and said proline residue is replaced by serine, said heavy chain constant region comprising CH2 and CH3 domains from IgG, wherein threonine is replaced by asparagine at position 256 in said CH2 region.

90. A protein of claim 81 where said single chain protein comprises a 2H7 single chain Fv binding domain, where in the connecting region said first, second, and third cysteine residues are replaced by serine and said proline residue is replaced by serine, said heavy chain constant region comprises 2H7 single chain Fv CH2 and CH3 domains from IgG, where in the CH2 domain arginine is replaced by glutamine at position 255, threonine is replaced by asparagine at position 256, proline is replaced by alanine at position 257, and glutamic acid is replaced by lysine at position 258.

91. A protein of claim 81 where said single chain protein comprises a single chain Fv binding domain from a 2H7 hybridoma, where in the connecting region said first, second and third cysteine residues are replaced by serine and said proline residue is replaced by serine, said heavy chain constant region comprising CH2 and CH3 domains from IgG₁ wherein lysine is replaced by glutamine at position 290 in said CH2 region.

92. A protein of claim 81 where said single chain protein comprises a single chain Fv binding domain from a 2H7 hybridoma, where in the connecting region said first, second and third cysteine residues are replaced by serine and said proline residue is replaced by serine, said heavy chain constant region comprising CH2 and CH3 domains from IgG, wherein alanine is replaced by proline at position 339 in said CH2 region.

93. A protein of claim 81 where said single chain protein comprises a single chain Fv binding domain from a G28-1 hybridoma, where in the connecting region said first, second, and third cysteine residues are replaced by serine and said proline residue is replaced by serine, said heavy chain constant region comprising CH2 and CH3 domains from IgG1.

94. A protein of claim 81 where said single chain protein comprises a single chain Fv binding domain from a G28-1 hybridoma, where in the connecting region said second and third cysteine residues are replaced by serine and said proline residue is replaced by serine, said heavy chain constant region comprising CH2 and CH3 domains from IgG₁.

95. A protein of claim 81 where said single chain protein comprises a single chain Fv binding domain from a G28-1 hybridoma, where in the connecting region said second cysteine residue is replaced by serine and said proline residue is replaced by serine, said heavy chain constant region comprising CH2 and CH3 domains from IgG₁.

96. A protein of claim 81 said single chain protein comprises a single chain Fv binding domain from a G28-1 hybridoma, where in the connecting region said first and second cysteine residues are replaced by serine, said heavy chain constant region comprising CH2 and CH3 domains from IgG₁.

97. A protein of claim 81 said single chain protein comprises a single chain Fv binding domain from a FC₂₋₂ hybridoma, where in the connecting region said first, second, and third cysteine residues are replaced by serine and said proline residue is replaced by serine, said heavy chain constant region comprising CH2 and CH3 domains from IgG₁.

98. A protein of claim 81 where said single chain protein comprises a single chain Fv binding domain from a UCHL-1 hybridoma, where in the connecting region said first, second, and third cysteine residues are replaced by serine and said proline residue is replaced by serine, said heavy chain constant region comprising CH2 and CH3 domains from IgG₁.

99. A protein of claim 81 where said single chain protein comprises a single chain Fv binding domain from a 5B9 hybridoma, where in the connecting region said first, second, and third cysteine residues are replaced by serine and said proline residue is replaced by serine, where said heavy chain constant region comprises CH2 and CH3 domains from IgG₁.

100. A protein of claim 81 where said single chain protein comprises a single chain Fv binding domain from a 2H7 hybridoma, where in the connecting region said first, second and third cysteine residues are replaced by serine and said proline residue is replaced by serine, said heavy chain constant region comprising CH2 and CH3 domains from IgG₁.

101. A protein of claim 81 where said single chain protein comprises a single chain Fv binding domain from a 2H7 hybridoma, where in the connecting region said second and third cysteine residues are replaced by serine and said proline residue is replaced by serine, where said heavy chain constant region comprises CH2 and CH3 domains from IgG₁.

102. A protein of claim 81 where said single chain protein comprises a single chain Fv binding domain from a G28-1 hybridoma, where in the connecting region said first and third cysteine residues are replaced by serine and said proline residue is replaced by serine, said heavy chain constant region comprising CH2 and CH3 domains from IgG₁.

103. A protein of claim 81 where said single chain protein comprises a single chain Fv binding domain from a G28-1 hybridoma comprising a connecting region wherein said third cysteine residue is replaced by serine and said proline residue is replaced by serine, said heavy chain constant region comprising CH2 and CH3 domains from IgG₁.

104. A protein of claim 81 where said single chain protein comprises a single chain Fv binding domain from a G28-1 hybridoma, where in the connecting region said first cysteine residue is replaced by serine, said heavy chain constant region comprising CH2 and CH3 domains from IgG₁.

105. A protein of claim 82 wherein said single chain protein comprises a single chain Fv binding domain from a G28-1 hybridoma, wherein said connecting region comprising a murine IgA hinge region, said heavy chain constant region comprises CH2 and CH3 domains from murine IgA and said CH3 comprises a deletion or substitution in four amino acids that render the IgA heavy chain constant region incapable of associating with a J chain polypeptide.

106. A protein of claim 82 wherein said single chain protein comprises a single chain Fv binding domain from a G28-1 hybridoma, wherein said connecting region comprising a human IgA hinge region and said heavy chain constant region comprises CH2 and CH3 domains from human IgA, where said CH3 comprises a deletion or substitution in four amino acids that render the IgA heavy chain constant region incapable of associating with a J chain polypeptide.

107. A protein of claim 81 where said single chain protein comprises a single chain Fv binding domain from a HD37 hybridoma, where in the connecting region said first, second, and third cysteine residues are replaced by serine and said proline reside is replaced by serine, and said heavy chain constant region comprising CH2 and CH3 domains from IgG₁.

108. A protein of claim 81 where said single chain protein comprises a L6 single chain Fv binding domain, where in the connecting region said first, second, and third cysteine residues are replaced by serine and said proline reside is replaced by serine, and said heavy chain constant region comprises CH2 and CH3 domains from IgG₁.

109. A non-naturally occurring single chain Fv protein comprising: i) a first polypeptide having a binding domain polypeptide capable of binding to a target molecule, said binding domain polypeptide comprising a heavy chain variable region where leucine is replaced by serine at position 11 in the first framework region of the heavy chain variable region; wherein said protein has an increased expression or stability in mammalian cells relative to a protein not having said amino acid substitution; ii) a second polypeptide comprising a connecting region attached to said first polypeptide; and iii) a third polypeptide comprising an N-terminally truncated immunoglobulin heavy chain constant region polypeptide attached to the second polypeptide, wherein said non-naturally occurring single-chain Fv protein is capable of at least one immunological activity.

110-413. (canceled)

The application's sequence listing, which the Patent Office published only in electronic form, follows.

SEQUENCE LISTING (699 sequences)

SEQ ID NO: 1 - DNA, 714 bp, Homo sapiens
tctgatcaggagcccaaatcttgtgacaaaactcacacatgcccaccgtgcccagcacctgaactcctggggggaccgtcagtcttcctcttccccccaaaacccaaggacaccctcatgatctcccggacccctgaggtcacatgcgtggtggtggacgtgagccacgaagaccctgaggtcaagttcaactggtacgtggacggcgtggaggtgcataatgccaagacaaagccgcgggaggagcagtacaacagcacgtaccgtgtggtcagcgtcctcaccgtcctgcaccaggactggctgaatggcaaggagtacaagtgcaaggtctccaacaaagccctcccagcccccatcgagaaaacaatctccaaagccaaagggcagccccgagaaccacaggtgtacaccctgcccccatcccgggatgagctgaccaagaaccaggtcagcctgacctgcctggtcaaaggcttctatcccagcgacatcgccgtggagtgggagagcaatgggcagccggagaacaactacaagaccacgcctcccgtgctggactccgacggctccttcttcctctacagcaagctcaccgtggacaagagcaggtggcagcaggggaacgtcttctcatgctccgtgatgcatgaggctctgcacaaccactacacgcagaagagcctctccctgtctccgggtaaatgatctaga

SEQ ID NO: 2 - protein, 235 aa, Homo sapiens
SDQEPKSCDKTHTCPPCPAPELLGGPSVFLFPPKPKDTLMISRTPEVTCVVVDVSHEDPEVKFNWYVDGVEVHNAKTKPREEQYNSTYRVVSVLTVLHQDWLNGKEYKCKVSNKALPAPIEKTISKAKGQPREPQVYTLPPSRDELTKNQVSLTCLVKGFYPSDIAVEWESNGQPENNYKTTPPVLDSDGSFFLYSKLTVDKSRWQQGNVFSCSVMHEALHNHYTQKSLSLSPGK

SEQ ID NO: 3 - DNA, 718 bp, Lama glama
  modified_base (34)..(34): n is a, c, g, or t
  modified_base (43)..(43): n is a, c, g, or t
  modified_base (52)..(52): n is a, c, g, or t
  modified_base (55)..(55): n is a, c, g, or t
  modified_base (58)..(58): n is a, c, g, or t
  modified_base (64)..(64): n is a, c, g, or t
tgatcaagaaccacatggaggatgcacgtgcccncagtgcccncaatgcccngcnccngaactnccaggaggcccttctgtctttgtcttccccccgaaacccaaggacgtcctctccatttttggaggccgagtcacgtgcgttgtagtggacgtcggaaagaaagaccccgaggtcaatttcaactggtatattgatggcgttgaggtgcgaacggccaatacgaagccaaaagaggaacagttcaacagcacgtaccgcgtggtcagcgtcctgcccatccagcaccaggactggctgacggggaaggaattcaagtgcaaggtcaacaacaaagctctcccggcccccatcgagaggaccatctccaaggccaaagggcagacccgggagccgcaggtgtacaccctggccccacaccgggaagaactggccaaggacaccgtgagcgtaacatgcctggtcaaaggcttctacccagctgacatcaacgttgagtggcagaggaacggtcagccggagtcagagggcacctacgccaacacgccgccacagctggacaacgacgggacctacttcctctacagcaagctctcggtgggaaagaacacgtggcagcggggagaaaccttaacctgtgtggtgatgcatgaggccctgcacaaccactacacccagaaatccatcacccagtcttcgggtaaatagtaatctaga

SEQ ID NO: 4 - protein, 231 aa, Lama glama
EPHGGCTCPQCPAPELPGGPSVFVFPPKPKDVLSISGRPEVTCVVVDVGKEDPEVNFNWYIDGVEVRTANTKPKEEQFNSTYRVVSVLPIQHQDWLTGKEFKCKVNNKALPAPIERTISKAKGQTREPQVYTLAPHREELAKDTVSVTCLVKGFYPADINVEWQRNGQPESEGTYANTPPQLDNDGTYFLYSRLSVGKNTWQRGETLTGVVMHEALHNHYTQKSITQSSGK

SEQ ID NO: 5 - DNA, 757 bp, Lama glama
tgatcaagaacccaagacaccaaaaccacaaccacaaccacaaccacaacccaatcctacaacagaatccaagtgtcccaaatgtccagcccctgagctcctgggagggccctcagtcttcatcttccccccgaaacccaaggacgtcctctccatttctgggaggcccgaggtcacgtgcgttgtggtagacgtgggccaggaagaccccgaggtcagtttcaactggtacattgatggcgctgaggtgcgaacggccaacacgaggccaaaagaggaacagttcaacagcacgtaccgcgtggtcagcgtcctgcccatccagcaccaggactggctgacggggaaggaattcaagtgcaaggtcaacaacaaagctctcccggcccccatcgagaagaccatctccaaggccaaagggcagacccgggagccgcaggtgtacaccctggccccacaccgggaagagctggccaaggacaccgtgagcgtaacatgcctggtcaaaggcttctacccacctgatatcaacgttgagtggcagaggaatgggcagccggagtcagagggcacytacgccaccacgccaccccagctggacaacgacgggacctacttcctctacagcaagctctcggtgggaaagaacacgtggcagcagggagaaaccttcacctgtgtggtgatgcacgaggccctgcacaaccactacacccagaaatccatcacccagtcttcgggtaaatagtaatctaga

SEQ ID NO: 6 - protein, 248 aa, Lama glama
DQEPKTPKPQPQPQPQPNPTTESKCPKCPAPELLGGPSVFIFPPKPKDVLSISGRPEVTCVVVDVGQEDPEVSFNWYIDGAEVRTANTRPKEEQFNSTYRVVSVLPIQHQDWLTGKEFKCKVNNKALPAPIEKTISKAKGQTREPQVYTLAPHREELAKDTVSVTCLVKGFYPPDINVEWQRNGQPESEGTYATTPPQLDNDGTYFLYSKLSVGKNTWQQGETFTCVVMHEALHNHYTQKSITQSSGK

SEQ ID NO: 7 - DNA, 727 bp, Lama glama
tgatcaagcgcaccacagcgaagaccccagctccaagtgtcccaaatgcccaggccctgaactccttggagggcccacggtcttcatcttccccccgaaagccaaggacgtcctctccatcacccgaaaacctgaggtcacgtgcttgtggtggacgtgggtaaagaagaccctgagatcgagttcaagctggtccgtggatgacacagaggtacacacggctgagacaaagccaaaggaggaacagttcaacagcacgtaccgcgtggtcagcgtcctgcccatccagcaccaggactggctgacggggaaggaattcaagtgcaaggtcaacaacaaagctctcccagcccccatcgagaggaccatctccaaggccaaagggcagacccgggagccgcaggtgtacaccctggccccacaccgggaagagctggccaaggacaccgtgagcgtaacctgcctggtcaaaggcttcttcccagctgacatcaacgttgagtggcagaggaatgggcagccggagtcagagggcacctacgccaacacgccgccacagctggacaacgacgggacctacttcctctacagcaaactctccgtgggaaagaacacgtggcagcagggagaagtcttcacctgtgtggtgatgcacgaggctctacacaatcactccacccagaaatccatcacccagtcttcgggtaaatagtaatctagagggccc

SEQ ID NO: 8 - protein, 236 aa, Lama glama
DQAHHSEDPSSKCPKCPGPELLGGPTVFIFPPKAKDVLSITRKPEVTCLWWTWVKKTLRSSSSWSVDDTEVHTAETKPKEEQFNSTYRVVSVLPIQHQDWLTGKEFKCKVNNKALPAPIERTISKAKGQTREPQVYTLAPHREELAKDTVSVTCLVKGFFPADINVEWQRNGQPESEGTYANTPPQLDNDGTYFLYSKLSVGKNTWQQGEVFTCVVMHEALHNHSTQKSITQSSGK

SEQ ID NO: 9 - DNA, 54 bp, Homo sapiens
gatcaggagcccaaatcttgtgacaaaactcacacatgcccaccgtgcccagca

SEQ ID NO: 10 - protein, 18 aa, Homo sapiens
DQEPKSCDKTHTCPPCPA

SEQ ID NO: 11 - DNA, 54 bp, Homo sapiens
gatctggagcccaaatcttgtgacaaaactcacacatgcccaccgtgcccagca

SEQ ID NO: 12 - protein, 18 aa, Homo sapiens
DLEPKSCDKTHTCPPCPA

SEQ ID NO: 13 - DNA, 327 bp, Homo sapiens
cctgaactcctggggggaccgtcagtcttcctcttccccccaaaacccaaggacaccctcatgatctcccggacccctgaggtcacatgcgtggtggtggacgtgagccacgaagaccctgaggtcaagttcaactggtacgtggacggcgtggaggtgcataatgccaagacaaagccgcgggaggagcagtacaacagcacgtaccgtgtggtcagcgtcctcaccgtcctgcaccaggactggctgaatggcaaggagtacaagtgcaaggtctccaacaaagccctcccagcccccatcgagaaaaccatctccaaagccaaa

SEQ ID NO: 14 - protein, 109 aa, Homo sapiens
PELLGGPSVFLFPPKPKDTLMISRTPEVTCVVVDVSHEDPEVKFNWYVDGVEVHNAKTKPREEQYNSTYRVVSVLTVLHQDWLNGKEYKCKVSNKALPAPIEKTISKAK

SEQ ID NO: 15 - DNA, 324 bp, Homo sapiens
gggcagccccgagaaccacaggtgtacaccctgcccccatcccgggaggagatgaccaagaaccaggtcagcctgacctgcctggtcaaaggcttctatcccagcgacatcgccgtggagtgggagagcaatgggcagccggagaacaactacaagaccacgcctcccgtgctggactccgacggctccttcttcctctatagcaagctcaccgtggacaagagcaggtggcagcaggggaacgtcttctcatgctccgtgatgcatgaggctctgcacaaccactacacgcagaagagcctctccctgtccccgggtaaatga

SEQ ID NO: 16 - protein, 107 aa, Homo sapiens
GQPREPQVYTLPPSREEMTKNQVSLTCLVKGFYPSDIAVEWESNGQPENNYKTTPPVLDSDGSFFLYSKLTVDKSRWQQGNVFSCSVMHEALHNHYTQKSLSLSPGK

SEQ ID NO: 17 - DNA, 54 bp, Homo sapiens
gatcaggagcccaaatcttctgacaaaactcacacatccccaccgtccccagca

SEQ ID NO: 18 - protein, 18 aa, Homo sapiens
DQEPKSSDKTHTSPPSPA

SEQ ID NO: 19 - DNA, 712 bp, Artificial Sequence
  Description of Artificial Sequence: Synthetic nucleotide sequence
tgatcaccccaaatcttctgacaaaactcacacatctccaccgtcctcagcacctgaactcctgggtggaccgtcagtcttcctcttccccccaaaacccaaggacaccctcatgatctcccggacccctgaggtcacatgcgtggtggtggacgtgagccacgaagaccctgaggtcaagttcaactggtacgtggacggcgtggaggtgcataatgccaagacaaagccgcgggaggagcagtacaacagcacgtaccgtgtggtcagcgtcctcaccgtcctgcaccaggactggctgaatggcaaggagtacaagtgcaaggtctccaacaaagccctcccagcccccatcgagaaaacaatctccaaagccaaagggcagccccgagaaccacaggtgtacaccctgcccccatcccgggatgagctgaccaagaaccaggtcagcctgacctgcctggtcaaaggcttctatcccagcgacatcgccgtggagtgggagagcaatgggcagccggagaacaactacaagaccacgcctcccgtgctggactccgacggctccttcttcctctacagcaagctcaccgtggacaagagcaggtggcagcaggggaacgtcttctcatgctccgtgatgcatgaggctctgcacaaccactacacgcagaagagcctctccctgtctccgggtaaatgataatctaga

SEQ ID NO: 20 - protein, 233 aa, Artificial Sequence
  Description of Artificial Sequence: Synthetic amino acid sequence
DHPKSSDKTHTSPPSSAPELLGGPSVFLFPPKPKDTLMISRTPEVTCVVVDVSHEDPEVKFNWYVDGVEVHNAKTKPREEQYNSTYRVVSVLTVLHQDWLNGKEYKCKVSNKALPAPIEKTISKAKGQPREPQVYTLPPSRDELTKNQVSLTCLVKGFYPSDIAVEWESNGQPENNYKTTPPVLDSDGSFFLYSKLTVDKSRWQQGNVFSCSVMHEALHNHYTQKSLSLSPGK

SEQ ID NO: 21 - DNA, 1527 bp, Lama glama
  modified_base (843)..(843): n is a, c, g, or t
  modified_base (852)..(852): n is a, c, g, or t
  modified_base (861)..(861): n is a, c, g, or t
  modified_base (864)..(864): n is a, c, g, or t
  modified_base (867)..(867): n is a, c, g, or t
  modified_base (873)..(873): n is a, c, g, or t
aagcttgccgccatggattttcaagtgcagattttcagcttcctgctaatcagtgcttcagtcataattgccagaggacaaattgttctctcccagtctccagcaatcctgtctgcatctccaggggagaaggtcacaatgacttgcagggccagctcaagtgtaagttacatgcactggtaccagcagaagccaggatcctcccccaaaccctggatttatgccccatccaacctggcttctggagtccctgctcgcttcagtggcagtgggtctgggacctcttactctctcacaatcagcagagtggaggctgaagatgctgccacttattactgccagcagtggagttttaacccacccacgttcggtgctgggaccaagctggagctgaaagatggcggtggctcgggcggtggtggatctggaggaggtgggagctctcaggcttatctacagcagtctggggctgagctggtgaggcctggggcctcagtgaagatgtcctgcaaggcttctggctacacatttaccagttacaatatgcactgggtaaagcagacacctagacagggcctggaatggattggagctatttatccaggaaatggtgatacttcctacaatcagaagttcaagggcaaggccacactgactgtagacaaatcctccagcacagcctacatgcagctcagcagcctgacatctgaagactctgcggtctatttctgtgcaagagtggtgtactatagtaactcttactggtacttcgatgtctggggcacagggaccacggtcaccgtctcttctgatcaagaaccacatggaggatgcacgtgcccncagtgcccncaatgcccngcnccngaactnccaggaggcccttctgtctttgtcttccccccgaaacccaaggacgtcctctccatttttggaggccgagtcacgtgcgttgtagtggacgtcggaaagaaagaccccgaggtcaatttcaactggtatattgatggcgttgaggtgcgaacggccaatacgaagccaaaagaggaacagttcaacagcacgtaccgcgtggtcagcgtcctgcccatccagcaccaggactggctgacggggaaggaattcaagtgcaaggtcaacaacaaagctctcccggcccccatcgagaggaccatctccaaggccaaagggcagacccgggagccgcaggtgtacaccctggccccacaccgggaagaactggccaaggacaccgtgagcgtaacatgcctggtcaaaggcttctacccagctgacatcaacgttgagtggcagaggaacggtcagccggagtcagagggcacctacgccaacacgccgccacagctggacaacgacgggacctacttcctctacagcaagctctcggtgggaaagaacacgtggcagcggggagaaaccttaacctgtgtggtgatgcatgaggccctgcacaaccactacacccagaaatccatcacccagtcttcgggtaaatagtaatctaga

SEQ ID NO: 22 - protein, 498 aa, Lama glama
MDFQVQIFSFLLISASVIIARGQIVLSQSPAILSASPGEKVTMTCRASSSVSYMHWYQQKPGSSPKPWIYAPSNLASGVPARFSGSGSGTSYSLTISRVEAEDAATYYCQQWSFNPPTFGAGTKLELKDGGGSGGGGSGGGGSSQAYLQQSGAELVRPGASVKMSCKASGYTFTSYNMHWVKQTPRQGLEWIGAIYPGNGDTSYNQKFKGKATLTVDKSSSTAYMQLSSLTSEDSAVYFCARVVYYSNSYWYFDVWGTGTTVTVSSDQEPHGGCTCPQCPAPELPGGPSVFVFPPKPKDVLSIFGGRVTCVVVDVGKKDPEVNFNWYIDGVEVRTANTKPKEEQFNSTYRVVSVLPIQHQDWLTGKEFKCKVNNKALPAPIERTISKAKGQTREPQVYTLAPHREELAKDTVSVTCLVKGFYPADINVEWQRNGQPESEGTYANTPPQLDNDGTYFLYSKLSVGKNTWQRGETLTCVVMHEALHNHYTQKSITQSSGK

SEQ ID NO: 23 - DNA, 1566 bp, Lama glama
aagcttgccgccatggattttcaagtgcagattttcagcttcctgctaatcagtgcttcagtcataattgccagaggacaaattgttctctcccagtctccagcaatcctgtctgcatctccaggggagaaggtcacaatgacttgcagggccagctcaagtgtaagttacatgcactggtaccagcagaagccaggatcctcccccaaaccctggatttatgccccatccaacctggcttctggagtccctgctcgcttcagtggcagtgggtctgggacctcttactctctcacaatcagcagagtggaggctgaagatgctgccacttattactgccagcagtggagttttaacccacccacgttcggtgctgggaccaagctggagctgaaagatggcggtggctcgggcggtggtggatctggaggaggtgggagctctcaggcttatctacagcagtctggggctgagctggtgaggcctggggcctcagtgaagatgtcctgcaaggcttctggctacacatttaccagttacaatatgcactgggtaaagcagacacctagacagggcctggaatggattggagctatttatccaggaaatggtgatacttcctacaatcagaagttcaagggcaaggccacactgactgtagacaaatcctccagcacagcctacatgcagctcagcagcctgacatctgaagactctgcggtctatttctgtgcaagagtggtgtactatagtaactcttactggtacttcgatgtctggggcacagggaccacggtcaccgtctcttctgatcaagaacccaagacaccaaaaccacaaccacaaccacaaccacaacccaatcctacaacagaatccaagtgtcccaaatgtccagcccctgagctcctgggagggccctcagtcttcatcttccccccgaaacccaaggacgtcctctccatttctgggaggcccgaggtcacgtgcgttgtggtagacgtgggccaggaagaccccgaggtcagtttcaactggtacattgatggcgctgaggtgcgaacggccaacacgaggccaaaagaggaacagttcaacagcacgtaccgcgtggtcagcgtcctgcccatccagcaccaggactggctgacggggaaggaattcaagtgcaaggtcaacaacaaagctctcccggcccccatcgagaagaccatctccaaggccaaagggcagacccgggagccgcaggtgtacaccctggccccacaccgggaagagctggccaaggacaccgtgagcgtaacatgcctggtcaaaggcttctacccacctgatatcaacgttgagtggcagaggaatgggcagccggagtcagagggcacytacgccaccacgccaccccagctggacaacgacgggacctacttcctctacagcaagctctcggtgggaaagaacacgtggcagcagggagaaaccttcacctgtgtggtgatgcacgaggccctgcacaaccactacacccagaaatccatcacccagtcttcgggtaaatagtaatctaga

SEQ ID NO: 24 - protein, 514 aa, Lama glama
MDFQVQIFSFLLISASVIIARGQIVLSQSPAILSASPGEKVTMTCRASSSVSYMHWYQQKPGSSPKPWIYAPSNLASGVPARFSGSGSGTSYSLTISRVEAEDAATYYCQQWSFNPPTFGAGTKLELKDGGGSGGGGSGGGGSSQAYLQQSGAELVRPGASVKMSCKASGYTFTSYNMHWVKQTPRQGLEWIGAIYPGNGDTSYNQKFKGKATLTVDKSSSTAYMQLSSLTSEDSAVYFCARVVYYSNSYWYFDVWGTGTTVTVSSDQEPKTPKPQPQPQPQPNPTTESKCPKCPAPELLGGPSVFIFPPKPKDVLSISGRPEVTCVVVDVGQEDPEVSFNWYIDGAEVRTANTRPKEEQFNSTYRVVSVLPIQHQDWLTGKEFKCKVNNKALPAPIEKTISKAKGQTREPQVYTLAPHREELAKDTVSVTCLVKGFYPPDINVEWQRNGQPESEGTYATTPPQLDNDGTYFLYSKLSVGKNTWQQGETFTCVVMHEALHNHYTQKSITQSSGK

SEQ ID NO: 25 - DNA, 1536 bp, Lama glama
aagcttgccgccatggattttcaagtgcagattttcagcttcctgctaatcagtgcttcagtcataattgccagaggacaaattgttctctcccagtctccagcaatcctgtctgcatctccaggggagaaggtcacaatgacttgcagggccagctcaagtgtaagttacatgcactggtaccagcagaagccaggatcctcccccaaaccctggatttatgccccatccaacctggcttctggagtccctgctcgcttcagtggcagtgggtctgggacctcttactctctcacaatcagcagagtggaggctgaagatgctgccacttattactgccagcagtggagttttaacccacccacgttcggtgctgggaccaagctggagctgaaagatggcggtggctcgggcggtggtggatctggaggaggtgggagctctcaggcttatctacagcagtctggggctgagctggtgaggcctggggcctcagtgaagatgtcctgcaaggcttctggctacacatttaccagttacaatatgcactgggtaaagcagacacctagacagggcctggaatggattggagctatttatccaggaaatggtgatacttcctacaatcagaagttcaagggcaaggccacactgactgtagacaaatcctccagcacagcctacatgcagctcagcagcctgacatctgaagactctgcggtctatttctgtgcaagagtggtgtactatagtaactcttactggtacttcgatgtctggggcacagggaccacggtcaccgtctcttctgatcaagcgaaccacagcgaagaccccagctccaagtgtcccaaatgcccaggccctgaactccttggagggcccacggtcttcatcttccccccgaaagccaaggacgtcctctccatcacccgaaaacctgaggtcacgtgcttgtggtggacgtgggtaaagaagaccctgagatcgagttcaagctggtccgtggatgacacagaggtacacacggctgagacaaagccaaaggaggaacagttcaacagcacgtaccgcgtggtcagcgtcctgcccatccagcaccaggactggctgacggggaaggaattcaagtgcaaggtcaacaacaaagctctcccagcccccatcgagaggaccatctccaaggccaaagggcagacccgggagccgcaggtgtacaccctggccccacaccgggaagagctggccaaggacaccgtgagcgtaacctgcctggtcaaaggcttcttcccagctgacatcaacgttgagtggcagaggaatgggcagccggagtcagagggcacctacgccaacacgccgccacagctggacaacgacgggacctacttcctctacagcaaactctccgtgggaaagaacacgtggcagcagggagaagtcttcacctgtgtggtgatgcacgaggctctacacaatcactccacccagaaatccatcacccagtcttcgggtaaatagtaatctagagggccc

SEQ ID NO: 26 - protein, 503 aa, Lama glama
MDFQVQIFSFLLISASVIIARGQIVLSQSPAILSASPGEKVTMTCRASSSVSYMHWYQQKPGSSPKPWIYAPSNLASGVPARFSGSGSGTSYSLTISRVEAEDAATYYCQQWSFNPPTFGAGTKLELKDGGGSGGGGSGGGGSSQAYLQQSGAELVRPGASVKMSCKASGYTFTSYNMHWVKQTPRQGLEWIGAIYPGNGDTSYNQKFKGKATLTVDKSSSTAYMQLSSLTSEDSAVYFCARVVYYSNSYWYFDVWGTGTTVTVSSDQAHSHSEDPSSKCPKCPGPELLGGPTVFIFPPKAKDVLSITRKPEVTCLWWTWVKKTLRSSSSWSVDDTEVHTAETKPKEEQFNSTYRVVSVLPIQHQDWLTGKEFKCKVNNKALPAPIERTISKAKGQTREPQVYTLAPHREELAKDTVSVTCLVKGFFPADINVEWQRNGQPESEGTYANTPPQLDNDGTYFLYSKLSVGKNTWQQGEVFTCVVMHEALHNHSTQKSITQSSGK

SEQ ID NO: 27 - DNA, 1521 bp, Artificial sequence
  Description of Artificial Sequence: Synthetic nucleotide sequence
aagcttgccgccatggattttcaagtgcagattttcagcttcctgctaatcagtgcttcagtcataattgccagaggacaaattgttctctcccagtctccagcaatcctgtctgcatctccaggggagaaggtcacaatgacttgcagggccagctcaagtgtaagttacatgcactggtaccagcagaagccaggatcctcccccaaaccctggatttatgccccatccaacctggcttctggagtccctgctcgcttcagtggcagtgggtctgggacctcttactctctcacaatcagcagagtggaggctgaagatgctgccacttattactgccagcagtggagttttaacccacccacgttcggtgctgggaccaagctggagctgaaagatggcggtggctcgggcggtggtggatctggaggaggtgggagctctcaggcttatctacagcagtctggggctgagctggtgaggcctggggcctcagtgaagatgtcctgcaaggcttctggctacacatttaccagttacaatatgcactgggtaaagcagacacctagacagggcctggaatggattggagctatttatccaggaaatggtgatacttcctacaatcagaagttcaagggcaaggccacactgactgtagacaaatcctccagcacagcctacatgcagctcagcagcctgacatctgaagactctgcggtctatttctgtgcaagagtggtgtactatagtaactcttactggtacttcgatgtctggggcacagggaccacggtcaccgtctcttctgatcaggagcccaaatcttgtgacaaaactcacacatgcccaccgtgcccagcacctgaactcctggggggaccgtcagtcttcctcttccccccaaaacccaaggacaccctcatgatctcccggacccctgaggtcacatgcgtggtggtggacgtgagccacgaagaccctgaggtcaagttcaactggtacgtggacggcgtggaggtgcataatgccaagacaaagccgcgggaggagcagtacaacagcacgtaccgtgtggtcagcgtcctcaccgtcctgcaccaggactggctgaatggcaaggagtacaagtgcaaggtctccaacaaagccctcccagcccccatcgagaaaacaatctccaaagccaaagggcagccccgagaaccacaggtgtacaccctgcccccatcccgggatgagctgaccaagaaccaggtcagcctgacctgcctggtcaaaggcttctatcccagcgacatcgccgtggagtgggagagcaatgggcagccggagaacaactacaagaccacgcctcccgtgctggactccgacggctccttcttcctctacagcaagctcaccgtggacaagagcaggtggcagcaggggaacgtcttctcatgctccgtgatgcatgaggctctgcacaaccactacacgcagaagagcctctccctgtctccgggtaaatgatctaga

SEQ ID NO: 28 - protein, 500 aa, Artificial sequence
  Description of Artificial Sequence: Synthetic amino acid sequence
MDFQVQIFSFLLISASVIIARGQIVLSQSPAILSASPGEKVTMTCRASSSVSYMHWYQQKPGSSPKPWIYAPSNLASGVPARFSGSGSGTSYSLTISRVEAEDAATYYCQQWSFNPPTFGAGTKLELKDGGGSGGGGSGGGGSSQAYLQQSGAELVRPGASVKMSCKASGYTFTSYNMHWVKQTPRQGLEWIGAIYPGNGDTSYNQKFKGKATLTVDKSSSTAYMQLSSLTSEDSAVYFCARVVYYSNSYWYFDVWGTGTTVTVSSDQEPKSCDKTHTCPPCPAPELLGGPSVFLFPPKPKDTLMISRTPEVTCVVVDVSHEDPEVKFNWYVDGVEVHNAKTKPREEQYNSTYRVVSVLTVLHQDWLNGKEYKCKVSNKALPAPIEKTISKAKGQPREPQVYTLPPSRDELTKNQVSLTCLVKGFYPSDIAVEWESNGQPENNYKTTPPVLDSDGSFFLYSKLTVDKSRWQQGNVFSCSVMHEALHNHYTQKSLSLSPGK

SEQ ID NO: 29 - DNA, 162 bp, Artificial sequence
  Description of Artificial Sequence: Synthetic nucleotide sequence
gcggatccttcgaacctgctcccatcctgggccattaccttaatctcagtaaatggaatttttgtgatatgctgcctgacctactgctttgccccaagatgcagagagagaaggaggaatgagagattgagaagggaaagtgtacgccctgtataaatcgat

SEQ ID NO: 30 - protein, 51 aa, Artificial sequence
  Description of Artificial Sequence: Synthetic amino acid sequence
ADPSNLLPSWAITLISVNGIFVICCLTYCFAPRCRERRRNERLRRESVRPV

SEQ ID NO: 31 - DNA, 399 bp, Artificial sequence
  Description of Artificial Sequence: Synthetic nucleotide sequence
aagcttatggattttcaagtgcagattttcagcttcctgctaatcagtgcttcagtcataatgtccagaggagtcgacattgttctgactcagtctccagccaccctgtctgtgactccaggagatagagtctctctttcctgcagggccagccagagtattagcgactacttacactggtatcaacaaaaatcacatgagtctccaaggcttctcatcaaatatgcttcccattccatctctgggatcccctccaggttcagtggcagtggatcagggtcagatttcactctcagtatcaacagtgtggaacctgaagatgttggaatttattactgtcaacatggtcacagctttccgtggacgttcggtggaggcaccaagctggaaatcaaacgg

SEQ ID NO: 32 - protein, 131 aa, Artificial sequence
  Description of Artificial Sequence: Synthetic amino acid sequence
MDFQVQIFSFLLISASVIMSRGVDIVLTQSPATLSVTPGDRVSLSCRASQSISDYLHWYQQKSHESPRLLIKYASHSISGIPSRFSGSGSGSDFTLSINSVEPEDVGIYYCQHGHSFPWTFGGGTKLEIKR

SEQ ID NO: 33 - DNA, 368 bp, Artificial sequence
  Description of Artificial Sequence: Synthetic nucleotide sequence
cagatccagttggtgcaatctggacctgagctgaagaagcctggagagacagtcaggatctcctgcaaggcttctgggtatgccttcacaactactggaatgcagtgggtgcaagagatgccaggaaagggtttgaagtggattggctggataaacaccccactctggagtgccaaaatatgtagaagacttcaaggacggtttgccttctctttggaaacctctgccaacactgcatatttacagataagcaacctcaaagatgaggacacggctacgtatttctgtgtgagatccgggaatggtaactatgacctggcctactttgcttactggggccaagggacactggtcactgtctctgatca

SEQ ID NO: 34 - protein, 121 aa, Artificial sequence
  Description of Artificial Sequence: Synthetic amino acid sequence
QIQLVQSGPELKKPGETVRISCKASGYAFTTTGMQWVQEMPGKGLKWIGWINTPLWSAKICRRLQGRFAFSLETSANTAYLQISNLKDEDTATYFCVRSGNGNYDLAYFAYWGQGTLVTVS

SEQ ID NO: 35 - DNA, 812 bp, Artificial sequence
  Description of Artificial Sequence: Synthetic nucleotide sequence
aagcttatggattttcaagtgcagattttcagcttcctgctaatcagtgcttcagtcataatgtccagaggagtcgacattgttctgactcagtctccagccaccctgtctgtgactccaggagatagagtctctctttcctgcagggccagccagagtattagcgactacttacactggtatcaacaaaaatcacatgagtctccaaggcttctcatcaaatatgcttcccattccatctctgggatcccctccaggttcagtggcagtggatcagggtcagatttcactctcagtatcaacagtgtggaacctgaagatgttggaatttattactgtcaacatggtcacagctttccgtggacgttcggtggaggcaccaagctggaaatcaaacggggtggcggtggctcgggcggaggtgggtcgggtggcggcggatctcagatccagttggtgcaatctggacctgagctgaagaagcctggagagacagtcaggatctcctgcaaggcttctgggtatgccttcacaactactggaatgcagtgggtgcaagagatgccaggaaagggtttgaagtggattggctggataaacaccccactctggagtgccaaaatatgtagaagacttcaaggacggtttgccttctctttggaaacctctgccaacactgcatatttacagataagcaacctcaaagatgaggacacggctacgtatttctgtgtgagatccgggaatggtaactatgacctggcctactttgcttactggggccaagggacactggtcactgtctctgatca

SEQ ID NO: 36 - protein, 267 aa, Artificial sequence
  Description of Artificial Sequence: Synthetic amino acid sequence
MDFQVQIFSFLLISASVIMSRGVDIVLTQSPATLSVTPGDRVSLSCRASQSISDYLHWYQQKSHESPRLLIKYASHSISGIPSRFSGSGSGSDFTLSINSVEPEDVGIYYCQHGHSFPWTFGGGTKLEIKRGGGGSGGGGSGGGGSQIQLVQSGPELKKPGETVRISCKASGYAFTTTGMQWVQEMPGKGLKWIGWINTPLWSAKICRRLQGRFAFSLETSANTAYLQISNLKDEDTATYFCVRSGNGNYDLAYFAYWGQGTLVTVS

SEQ ID NO: 37 - DNA, 405 bp, Artificial sequence
  Description of Artificial Sequence: Synthetic nucleotide sequence
atggattttcaagtgcagattttcagcttcctgctaatcagtgcttcagtcataatgtccagaggagtcgacattgtgctcacccaatctccagcttctttggctgtgtctctaggtcagagagccaccatctcctgcagagccagtgaaagtgttgaatattatgtcacaagtttaatgcagtggtaccaacagaaaccaggacagccacccaaactcctcatctctgctgcatccaacgtagaatctggggtccctgccaggtttagtggcagtgggtctgggacagacttcagcctcaacatccatcctgtggaggaggatgatattgcaatgtatttctgtcagcaaagtaggaaggttccttggacgttcggtggaggcaccaagctggaaatcaaacgg

SEQ ID NO: 38 - protein, 135 aa, Artificial sequence
  Description of Artificial Sequence: Synthetic amino acid sequence
MDFQVQIFSFLLISASVIMSRGVDIVLTQSPASLAVSLGQRATISCRASESVEYYVTSLMQWYQQKPGQPPKLLISAASNVESGVPARFSGSGSGTDFSLNIHPVEEDDIAMYFCQQSRKVPWTFGGGTKLEIKR

SEQ ID NO: 39 - DNA, 369 bp, Artificial sequence
  Description of Artificial Sequence: Synthetic nucleotide sequence
caggtgcagctgaaggagtcaggacctggcctggtggcgccctcacagagcctgtccatcacatgcaccgtctcagggttctcattaaccggctatggtgtaaactgggttcgccagcctccaggaaagggtctggagtggctgggaatgatatggggtgatggaagcacagactataattcagctctcaaatccagactgagcatcaccaaggacaactccaagagccaagttttcttaaaaatgaacagtctgcaaactgatgacacagccagatactactgtgccagagatggttatagtaactttcattactatgttatggactactggggtcaaggaacctcagtcaccgtctcctcagatctg

SEQ ID NO: 40 - protein, 121 aa, Artificial sequence
  Description of Artificial Sequence: Synthetic amino acid sequence
QVQLKESGPGLVAPSQSLSITCTVSGFSLTGYGVNWVRQPPGKGLEWLGMIWGDGSTDYNSALKSRLSITKDNSKSQVFLKMNSLQTDDTARYYCARDGYSNFHYYVMDYWGQGTSVTVSS

SEQ ID NO: 41 - DNA, 825 bp, Artificial sequence
  Description of Artificial Sequence: Synthetic nucleotide sequence
aagcttatggattttcaagtgcagattttcagcttcctgctaatcagtgcttcagtcataatgtccagaggagtcgacattgtgctcacccaatctccagcttctttggctgtgtctctaggtcagagagccaccatctcctgcagagccagtgaaagtgttgaatattatgtcacaagtttaatgcagtggtaccaacagaaaccaggacagccacccaaactcctcatctctgctgcatccaacgtagaatctggggtccctgccaggtttagtggcagtgggtctgggacagacttcagcctcaacatccatcctgtggaggaggatgatattgcaatgtatttctgtcagcaaagtaggaaggttccttggacgttcggtggaggcaccaagctggaaatcaaacggggtggcggtggctcgggcggaggtgggtcgggtggcggcggatctcaggtgcagctgaaggagtcaggacctggcctggtggcgccctcacagagcctgtccatcacatgcaccgtctcagggttctcattaaccggctatggtgtaaactgggttcgccagcctccaggaaagggtctggagtggctgggaatgatatggggtgatggaagcacagactataattcagctctcaaatccagactgagcatcaccaaggacaactccaagagccaagttttcttaaaaatgaacagtctgcaaactgatgacacagccagatactactgtgccagagatggttatagtaactttcattactatgttatggactactggggtcaaggaacctcagtcaccgtctcctctgatcag

SEQ ID NO: 42 - protein, 271 aa, Artificial sequence
  Description of Artificial Sequence: Synthetic amino acid sequence
MDFQVQIFSFLLISASVIMSRGVDIVLTQSPASLAVSLGQRATISCRASESVEYYVTSLMQWYQQKPGQPPKLLISAASNVESGVPARFSGSGSGTDFSLNIHPVEEDDIAMYFCQQSRKVPWTFGGGTKLEIKRGGGGSGGGGSGGGGSQVQLKESGPGLVAPSQSLSITCTVSGFSLTGYGVNWVRQPPGKGLEWLGMIWGDGSTDYNSALKSRLSITKDNSKSQVFLKMNSLQTDDTARYYCARDGYSNFHYYVMDYWGQGTSVTVSS

SEQ ID NO: 43 - DNA, 393 bp, Artificial sequence
  Description of Artificial Sequence: Synthetic nucleotide sequence
atggattttcaagtgcagattttcagcttcctgctaatcagtgcttcagtcataatgtccagaggagtcgacatccagatgacacagtctccatcctcactgtctgcatctctgggaggcaaagtcaccatcacttgcaaggcaagccaagacattaagaagtatataggttggtaccaacacaagcctggaaaaggtcccaggctgctcatatattacacatctacattacagccaggcatcccatcaaggttcagtggaagtgggtctgggagagattattccctcagcatcagaaacctggagcctgaagatattgcaacttattattgtcaacagtatgataatcttccattgacgttcggctcggggacaaagttggaaataaaacgg

SEQ ID NO: 44 - protein, 131 aa, Artificial sequence
  Description of Artificial Sequence: Synthetic amino acid sequence
MDFQVQIFSFLLISASVIMSRGVDIQMTQSPSSLSASLGGKVTITCKASQDIKKYIGWYQHKPGKGPRLLIYYTSTLQPGIPSRFSGSGSGRDYSLSIRNLEPEDIATYYCQQYDNLPLTFGSGTKLEIKR

SEQ ID NO: 45 - DNA, 362 bp, Artificial sequence
  Description of Artificial Sequence: Synthetic nucleotide sequence
gatgtacagcttcaggagtcaggacctggcctcgtgaaaccttctcagtctctgtctctcacctgctctgtcactggctactccatcaccagtggtttctactggaactggatccgacagtttccgggaaacaaactggaatggatgggccacataagccacgacggtaggaataactacaacccatctctcataaatcgaatctccatcactcgtgacacatctaagaaccagtttttcctgaagttgagttctgtgactactgaggacacagctacatatttctgtgcaagacactacggtagtagcggagctatggactactggggtcaaggaacctcagtcaccgtctcctctgatca

SEQ ID NO: 46 - protein, 119 aa, Artificial sequence
  Description of Artificial Sequence: Synthetic amino acid sequence
DVQLQESGPGLVKPSQSLSLTCSVTGYSITSGFYWNWIRQFPGNKLEWMGHISHDGRNNYNPSLINRISITRDTSKNQFFLKLSSVTTEDTATYFCARHYGSSGAMDYWGQGTSVTVSS

SEQ ID NO: 47 - DNA, 806 bp, Artificial sequence
  Description of Artificial Sequence: Synthetic nucleotide sequence
aagcttatggattttcaagtgcagattttcagcttcctgctaatcagtgcttcagtcataatgtccagaggagtcgacatccagatgacacagtctccatcctcactgtctgcatctctgggaggcaaagtcaccatcacttgcaaggcaagccaagacattaagaagtatataggttggtaccaacacaagcctggaaaaggtcccaggctgctcatatattacacatctacattacagccaggcatcccatcaaggttcagtggaagtgggtctgggagagattattccctcagcatcagaaacctggagcctgaagatattgcaacttattattgtcaacagtatgataatcttccattgacgttcggctcggggacaaagttggaaataaaacggggtggcggtggctcgggcggtggtgggtcgggtggcggcggatctgatgtacagcttcaggagtcaggacctggcctcgtgaaaccttctcagtctctgtctctcacctgctctgtcactggctactccatcaccagtggtttctactggaactggatccgacagtttccgggaaacaaactggaatggatgggccacataagccacgacggtaggaataactacaacccatctctcataaatcgaatctccatcactcgtgacacatctaagaaccagtttttcctgaagttgagttctgtgactactgaggacacagctacatatttctgtgcaagacactacggtagtagcggagctatggactactggggtcaaggaacctcagtcaccgtctcctctgatca

SEQ ID NO: 48 - protein, 266 aa, Artificial sequence
  Description of Artificial Sequence: Synthetic amino acid sequence
MDFQVQIFSFLLISASVIMSRGVDIQMTQSPSSLSASLGGKVTITCKASQDIKKYIGWYQHKPGKGPRLLIYYTSTLQPGIPSRFSGSGSGRDYSLSIRNLEPEDIATYYCQQYDNLPLTFGSGTKLEIKRGGGGSGGGGSGGGGSDVQLQESGPGLVKPSQSLSLTCSVTGYSITSGFYWNWIRQFPGNKLEWMGHISHDGRNNYNPSLINRISITRDTSKNQFFLKLSSVTTEDTATYFCARHYGSSGAMDYWGQGTSVTVSSD

SEQ ID NO: 49 - DNA, 1671 bp, Artificial sequence
  Description of Artificial Sequence: Synthetic nucleotide sequence
aagcttatggattttcaagtgcagattttcagcttcctgctaatcagtgcttcagtcataatgtccagaggagtcgacattgttctgactcagtctccagccaccctgtctgtgactccaggagatagagtctctctttcctgcagggccagccagagtattagcgactacttacactggtatcaacaaaaatcacatgagtctccaaggcttctcatcaaatatgcttcccattccatctctgggatcccctccaggttcagtggcagtggatcagggtcagatttcactctcagtatcaacagtgtggaacctgaagatgttggaatttattactgtcaacatggtcacagctttccgtggacgttcggtggaggcaccaagctggaaatcaaacggggtggcggtggctcgggcggaggtgggtcgggtggcggcggatctcagatccagttggtgcaatctggacctgagctgaagaagcctggagagacagtcaggatctcctgcaaggcttctgggtatgccttcacaactactggaatgcagtgggtgcaagagatgccaggaaagggtttgaagtggattggctggataaacaccccactctggagtgccaaaatatgtagaagacttcaaggacggtttgccttctctttggaaacctctgccaacactgcatatttacagataagcaacctcaaagatgaggacacggctacgtatttctgtgtgagatccgggaatggtaactatgacctggcctactttgcttactggggccaagggacactggtcactgtctctgatctggagcccaaatcttctgacaaaactcacacatccccaccgtccccagcacctgaactcctggggggatcgtcagtcttcctcttccccccaaaacccaaggacaccctcatgatctcccggacccctgaggtcacatgcgtggtggtggacgtgagccacgaagaccctgaggtcaagttcaactggtacgtggacggcgtggaggtgcataatgccaagacaaagccgcgggaggagcagtacaacagcacgtaccgtgtggtcagcgtcctcaccgtcctgcaccaggactggctgaatggcaaggagtacaagtgcaaggtctccaacaaagccctcccagcccccatcgagaaaaccatctccaaagccaaagggcagccccgagaaccacaggtgtacaccctgcccccatcccgggatgagctgaccaagaaccaggtcagcctgacctgcctggtcaaaggcttctatcccagcgacatcgccgtggagtgggagagcaatgggcagccggagaacaactacaagaccacgcctcccgtgctggactccgacggctccttcttcctctacagcaagctcaccgtggacaagagcaggtggcagcaggggaacgtcttctcatgctccgtgatgcatgaggctctgcacaaccactacacgcagaagagcctctccctgtctccgggtaaagcggatccttcgaacctgctcccatcctgggccattaccttaatctcagtaaatggaatttttgtgatatgctgcctgacctactgctttgccccaagatgcagagagagaaggaggaatgagagattgagaagggaaagtgtacgccctgtataaatcgat

SEQ ID NO: 50 - protein, 552 aa, Artificial sequence
  Description of Artificial Sequence: Synthetic amino acid sequence
MDFQVQIFSFLLISASVIMSRGVDIVLTQSPATLSVTPGDRVSLSCRASQSISDYLHWYQQKSHESPRLLIKYASHSISGIPSRFSGSGSGSDFTLSINSVEPEDVGIYYCQHGHSFPWTFGGGTKLEIKRGGGGSGGGGSGGGGSQIQLVQSGPELKKPGETVRISCKASGYAFTTTGMQWVQEMPGKGLKWIGWINTPLWSAKICRRLQGRFAFSLETSANTAYLQISNLKDEDTATYFCVRSGNGNYDLAYFAYWGQGTLVTVSDLEPKSSDKTHTSPPSPAPELLGGSSVFLFPPKPKDTLMISRTPEVTCVVVDVSHEDPEVKFNWYVDGVEVHNAKTKPREEQYNSTYRVVSVLTVLHQDWLNGKEYKCKVSNKALPAPIEKTISKAKGQPREPQVYTLPPSRDELTKNQVSLTCLVKGFYPSDIAVEWESNGQPENNYKTTPPVLDSDGSFFLYSKLTVDKSRWQQGNVFSCSVMHEALHNHYTQKSLSLSPGKADPSNLLPSWAITLISVNGIFVICCLTYCFAPRCRERRRNERLRRESVRPV

SEQ ID NO: 51 - DNA, 1683 bp, Artificial sequence
  Description of Artificial Sequence: Synthetic nucleotide sequence
aagcttatggattttcaagtgcagattttcagcttcctgctaatcagtgcttcagtcataatgtccagaggagtcgacattgtgctcacccaatctccagcttctttggctgtgtctctaggtcagagagccaccatctcctgcagagccagtgaaagtgttgaatattatgtcacaagtttaatgcagtggtaccaacagaaaccaggacagccacccaaactcctcatctctgctgcatccaacgtagaatctggggtccctgccaggtttagtggcagtgggtctgggacagacttcagcctcaacatccatcctgtggaggaggatgatattgcaatgtatttctgtcagcaaagtaggaaggttccttggacgttcggtggaggcaccaagctggaaatcaaacggggtggcggtggctcgggcggaggtgggtcgggtggcggcggatctcaggtgcagctgaaggagtcaggacctggcctggtggcgccctcacagagcctgtccatcacatgcaccgtctcagggttctcattaaccggctatggtgtaaactgggttcgccagcctccaggaaagggtctggagtggctgggaatgatatggggtgatggaagcacagactataattcagctctcaaatccagactgagcatcaccaaggacaactccaagagccaagttttcttaaaaatgaacagtctgcaaactgatgacacagccagatactactgtgccagagatggttatagtaactttcattactatgttatggactactggggtcaaggaacctcagtcaccgtctcctcagatctggagcccaaatcttctgacaaaactcacacatccccaccgtccccagcacctgaactcctggggggatcgtcagtcttcctcttccccccaaaacccaaggacaccctcatgatctcccggacccctgaggtcacatgcgtggtggtggacgtgagccacgaagaccctgaggtcaagttcaactggtacgtggacggcgtggaggtgcataatgccaagacaaagccgcgggaggagcagtacaacagcacgtaccgtgtggtcagcgtcctcaccgtcctgcaccaggactggctgaatggcaaggagtacaagtgcaaggtctccaacaaagccctcccagcccccatcgagaaaaccatctccaaagccaaagggcagccccgagaaccacaggtgtacaccctgcccccatcccgggatgagctgaccaagaaccaggtcagcctgacctgcctggtcaaaggcttctatcccagcgacatcgccgtggagtgggagagcaatgggcagccggagaacaactacaagaccacgcctcccgtgctggactccgacggctccttcttcctctacagcaagctcaccgtggacaagagcaggtggcagcaggggaacgtcttctcatgctccgtgatgcatgaggctctgcacaaccactacacgcagaagagcctctccctgtctccgggtaaagcggatccttcgaacctgctcccatcctgggccattaccttaatctcagtaaatggaatttttgtgatatgctgcctgacctactgctttgccccaagatgcagagagagaaggaggaatgagagattgagaagggaaagtgtacgccctgtataaatcgat

SEQ ID NO: 52 - protein, 556 aa, Artificial sequence
  Description of Artificial Sequence: Synthetic amino acid sequence
MDFQVQIFSFLLISASVIMSRGVDIVLTQSPASLAVSLGQRATISCRASESVEYYVTSLMQWYQQKPGQPPKLLISAASNVESGVPARFSGSGSGTDFSLNIHPVEEDDIAMYFCQQSRKVPWTFGGGTKLEIKRGGGGSGGGGSGGGGSQVQLKESGPGLVAPSQSLSITCTVSGFSLTGYGVNWVRQPPGKGLEWLGMIWGDGSTDYNSALKSRLSITKDNSKSQVFLKMNSLQTDDTARYYCARDGYSNFHYYVMDYWGQGTSVTVSSDLEPKSSDKTHTSPPSPAPELLGGSSVFLFPPKPKDTLMISRTPEVTCVVVDVSHEDPEVKFNWYVDGVEVHNAKTKPREEQYNSTYRVVSVLTVLHQDWLNGKEYKCKVSNKALPAPIEKTISKAKGQPREPQVYTLPPSRDELTKNQVSLTCLVKGFYPSDIAVEWESNGQPENNYKTTPPVLDSDGSFFLYSKLTVDKSRWQQGNVFSCSVMHEALHNHYTQKSLSLSPGKADPSNLLPSWAITLISVNGIFVICCLTYCFAPRCRERRRNERLRRESVRPV

SEQ ID NO: 53 - DNA, 1665 bp, Artificial sequence
  Description of Artificial Sequence: Synthetic nucleotide sequence
aagcttatggattttcaagtgcagattttcagcttcctgctaatcagtgcttcagtcataatgtccagaggagtcgacatccagatgacacagtctccatcctcactgtctgcatctctgggaggcaaagtcaccatcacttgcaaggcaagccaagacattaagaagtatataggttggtaccaacacaagcctggaaaaggtcccaggctgctcatatattacacatctacattacagccaggcatcccatcaaggttcagtggaagtgggtctgggagagattattccctcagcatcagaaacctggagcctgaagatattgcaacttattattgtcaacagtatgataatcttccattgacgttcggctcggggacaaagttggaaataaaacggggtggcggtggctcgggcggtggtgggtcgggtggcggcggatctgatgtacagcttcaggagtcaggacctggcctcgtgaaaccttctcagtctctgtctctcacctgctctgtcactggctactccatcaccagtggtttctactggaactggatccgacagtttccgggaaacaaactggaatggatgggccacataagccacgacggtaggaataactacaacccatctctcataaatcgaatctccatcactcgtgacacatctaagaaccagtttttcctgaagttgagttctgtgactactgaggacacagctacatatttctgtgcaagacactacggtagtagcggagctatggactactggggtcaaggaacctcagtcaccgtctcctctgatctggagcccaaatcttctgacaaaactcacacatccccaccgtccccagcacctgaactcctggggggatcgtcagtcttcctcttccccccaaaacccaaggacaccctcatgatctcccggacccctgaggtcacatgcgtggtggtggacgtgagccacgaagaccctgaggtcaagttcaactggtacgtggacggcgtggaggtgcataatgccaagacaaagccgcgggaggagcagtacaacagcacgtaccgtgtggtcagcgtcctcaccgtcctgcaccaggactggctgaatggcaaggagtacaagtgcaaggtctccaacaaagccctcccagcccccatcgagaaaaccatctccaaagccaaagggcagccccgagaaccacaggtgtacaccctgcccccatcccgggatgagctgaccaagaaccaggtcagcctgacctgcctggtcaaaggcttctatcccagcgacatcgccgtggagtgggagagcaatgggcagccggagaacaactacaagaccacgcctcccgtgctggactccgacggctccttcttcctctacagcaagctcaccgtggacaagagcaggtggcagcaggggaacgtcttctcatgctccgtgatgcatgaggctctgcacaaccactacacgcagaagagcctctccctgtctccgggtaaagcggatccttcgaacctgctcccatcctgggccattaccttaatctcagtaaatggaatttttgtgatatgctgcctgacctactgctttgccccaagatgcagagagagaaggaggaatgagagattgagaagggaaagtgtacgccctgtataaatcgat

SEQ ID NO: 54 - protein, 550 aa, Artificial sequence
  Description of Artificial Sequence: Synthetic amino acid sequence
MDFQVQIFSFLLISASVIMSRGVDIQMTQSPSSLSASLGGKVTITCKASQDIKKYIGWYQHKPGKGPRLLIYYTSTLQPGIPSRFSGSGSGRDYSLSIRNLEPEDIATYYCQQYDNLPLTFGSGTKLEIKRGGGGSGGGGSGGGGSDVQLQESGPGLVKPSQSLSLTCSVTGYSITSGFYWNWIRQFPGNKLEWMGHISHDGRNNYNPSLINRISITRDTSKNQFFLKLSSVTTEDTATYFCARHYGSSGAMDYWGQGTSVTVSSDLEPKSSDKTHTSPPSPAPELLGGSSVFLFPPKPKDTLMISRTPEVTCVVVDVSHEDPEVKFNWYVDGVEVHNAKTKPREEQYNSTYRVVSVLTVLHQDWLNGKEYKCKVSNKALPAPIEKTISKAKGQPREPQVYTLPPSRDELTKNQVSLTCLVKGFYPSDIAVEWESNGQPENNYKTTPPVLDSDGSFFLYSKLTVDKSRWQQGNVFSCSVMHEALHNHYTQKSLSLSPGKADPSNLLPSWAITLISVNGIFVICCLTYCFAPRCRERRRNERLRRESVRPV

SEQ ID NO: 55 - DNA, 1653 bp, Artificial sequence
  Description of Artificial Sequence: Synthetic nucleotide sequence
atgttgtatacatctcagctccttgggcttttactcttctggatttcagcctccagaagtgacatagtgctgactcagactccagccactctgtctctaattcctggagaaagagtcacaatgacctgtaagaccagtcagaatattggcacaatcttacactggtatcaccaaaaaccaaaggaggctccaagggctctcatcaagtatgcttcgcagtccattcctgggatcccctccagattcagtggcagtggttcggaaacagatttcactctcagcatcaataacctggagcctgatgatatcggaatttattactgtcaacaaagtagaagctggcctgtcacgttcggtcctggcaccaagctggagataaaacggggtggcggtggctcgggcggaggtgggtcgggtggcggcggatctcaggtcaagctgcagcagtccggttctgaactagggaaacctggggcctcagtgaaactgtcctgcaagacttcaggctacatattcacagatcactatatttcttgggtgaaacagaagcctggagaaagcctgcagtggataggaaatgtttatggtggaaatggtggtacaagctacaatcaaaaattccagggcaaggccacactgactgtagataaaatctctagcacagcctacatggaactcagcagcctgacatctgaggattctgccatctattactgtgcaagaaggccggtagcgacgggccatgctatggactactggggtcaggggatccaagttaccgtctcctctgatctggagcccaaatcttctgacaaaactcacacatccccaccgtccccagcacctgaactcctggggggatcgtcagtcttcctcttccccccaaaacccaaggacaccctcatgatctcccggacccctgaggtcacatgcgtggtggtggacgtgagccacgaagaccctgaggtcaagttcaactggtacgtggacggcgtggaggtgcataatgccaagacaaagccgcgggaggagcagtacaacagcacgtaccgtgtggtcagcgtcctcaccgtcctgcaccaggactggctgaatggcaaggagtacaagtgcaaggtctccaacaaagccctcccagcccccatcgagaaaaccatctccaaagccaaagggcagccccgagaaccacaggtgtacaccctgcccccatcccgggatgagctgaccaagaaccaggtcagcctgacctgcctggtcaaaggcttctatcccagcgacatcgccgtggagtgggagagcaatgggcagccggagaacaactacaagaccacgcctcccgtgctggactccgacggctccttcttcctctacagcaagctcaccgtggacaagagcaggtggcagcaggggaacgtcttctcatgctccgtgatgcatgaggctctgcacaaccactacacgcagaagagcctctccctgtctccgggtaaagcggatccttcgaacctgctcccatcctgggccattaccttaatctcagtaaatggaatttttgtgatatgctgcctgacctactgctttgccccaagatgcagagagagaaggaggaatgagagattgagaagggaaagtgtacgccctgtataaatcgat

SEQ ID NO: 56 - protein, 548 aa, Artificial sequence
  Description of Artificial Sequence: Synthetic amino acid sequence
MLYTSQLLGLLLFWISASRSDIVLTQTPATLSLIPGERVTMTCKTSQNIGTILHWYHQKPKEAPRALIKYASQSIPGIPSRFSGSGSETDFTLSINNLEPDDIGIYYCQQSRSWPVTFGPGTKLEIKRGGGGSGGGGSGGGGSQVKLQQSGSELGKPGASVKLSCKTSGYIFTDHYISWVKQKPGESLQWIGNVYGGNGGTSYNQKFQGKATLTVDKISSTAYMELSSLTSEDSAIYYCARRPVATGHAMDYWGQGIQVTVSSDLEPKSSDKTHTSPPSPAPELLGGSSVFLFPPKPKDTLMISRTPEVTCVVVDVSHEDPEVKFNWYVDGVEVHNAKTKPREEQYNSTYRVVSVLTVLHQDWLNGKEYKCKVSNKALPAPIEKTISKAKGQPREPQVYTLPPSRDELTKNQVSLTCLVKGFYPSDIAVEWESNGQPENNYKTTPPVLDSDGSFFLYSKLTVDKSRWQQGNVFSCSVMHEALHNHYTQKSLSLSPGKADPSNLLPSWAITLISVNGIFVICCLTYCFAPRCRERRRNERLRRESVRPV

SEQ ID NO: 57 - DNA, 1521 bp, Artificial sequence
  Description of Artificial Sequence: Synthetic nucleotide sequence
aagcttgccgccatggattttcaagtgcagattttcagcttcctgctaatcagtgcttcagtcataattgccagaggacaaattgttctctcccagtctccagcaatcctgtctgcatctccaggggagaaggtcacaatgacttgcagggccagctcaagtgtaagttacatgcactggtaccagcagaagccaggatcctcccccaaaccctggatttatgccccatccaacctggcttctggagtccctgctcgcttcagtggcagtgggtctgggacctcttactctctcacaatcagcagagtggaggctgaagatgctgccacttattactgccagcagtggagttttaacccacccacgttcggtgctgggaccaagctggagctgaaagatggcggtggctcgggcggtggtggatctggaggaggtgggagctctcaggcttatctacagcagtctggggctgagctggtgaggcctggggcctcagtgaagatgtcctgcaaggcttctggctacacatttaccagttacaatatgcactgggtaaagcagacacctagacagggcctggaatggattggagctatttatccaggaaatggtgatacttcctacaatcagaagttcaagggcaaggccacactgactgtagacaaatcctccagcacagcctacatgcagctcagcagcctgacatctgaagactctgcggtctatttctgtgcaagagtggtgtactatagtaactcttactggtacttcgatgtctggggcacagggaccacggtcaccgtctcttctgatcaggagcccaaatcttctgacaaaactcacacatccccaccgtccccagcacctgaactcctggggggaccgtcagtcttcctcttccccccaaaacccaaggacaccctcatgatctcccggacccctgaggtcacatgcgtggtggtggacgtgagccacgaagaccctgaggtcaagttcaactggtacgtggacggcgtggaggtgcataatgccaagacaaagccgcgggaggagcagtacaacagcacgtaccgtgtggtcagcgtcctcaccgtcctgcaccaggactggctgaatggcaaggagtacaagtgcaaggtctccaacaaagccctcccagcccccatcgagaaaacaatctccaaagccaaagggcagccccgagaaccacaggtgtacaccctgcccccatcccgggatgagctgaccaagaaccaggtcagcctgacctgcctggtcaaaggcttctatcccagcgacatcgccgtggagtgggagagcaatgggcagccggagaacaactacaagaccacgcctcccgtgctggactccgacggctccttcttcctctacagcaagctcaccgtggacaagagcaggtggcagcaggggaacgtcttctcatgctccgtgatgcatgaggctctgcacaaccactacacgcagaagagcctctccctgtctccgggtaaatgatctaga

SEQ ID NO: 58 - protein, 500 aa, Artificial sequence
  Description of Artificial Sequence: Synthetic amino acid sequence
MDFQVQIFSFLLISASVIIARGQIVLSQSPAILSASPGEKVTMTCRASSSVSYMHWYQQKPGSSPKPWIYAPSNLASGVPARFSGSGSGTSYSLTISRVEAEDAATYYCQQWSFNPPTFGAGTKLELKDGGGSGGGGSGGGGSSQAYLQQSGAELVRPGASVKMSCKASGYTFTSYNMHWVKQTPRQGLEWIGAIYPGNGDTSYNQKFKGKATLTVDKSSSTAYMQLSSLTSEDSAVYFCARVVYYSNSYWYFDVWGTGTTVTVSSDQEPKSSDKTHTSPPSPAPELLGGPSVFLFPPKPKDTLMISRTPEVTCVVVDVSHEDPEVKFNWYVDGVEVHNAKTKPREEQYNSTYRVVSVLTVLHQDWLNGKEYKCKVSNKALPAPIEKTISKAKGQPREPQVYTLPPSRDELTKNQVSLTCLVKGFYPSDIAVEWESNGQPENNYKTTPPVLDSDGSFFLYSKLTVDKSRWQQGNVFSCSVMHEALHNHYTQKSLSLSPGK

SEQ ID NO: 59 - DNA, 1536 bp, Artificial sequence
  Description of Artificial Sequence: Synthetic nucleotide sequence
aagcttgccgccatggattttcaagtgcagattttcagcttcctgctaatcagtgcttcagtcataattgccagaggacaaattgttctctcccagtctccagcaatcctgtctgcatctccaggggagaaggtcacaatgacttgcagggccagctcaagtgtaagttacatgcactggtaccagcagaagccaggatcctcccccaaaccctggatttatgccccatccaacctggcttctggagtccctgctcgcttcagtggcagtgggtctgggacctcttactctctcacaatcagcagagtggaggctgaagatgctgccacttattactgccagcagtggagttttaacccacccacgttcggtgctgggaccaagctggagctgaaagatggcggtggctcgggcggtggtggatctggaggaggtgggagctctcaggcttatctacagcagtctggggctgagctggtgaggcctggggcctcagtgaagatgtcctgcaaggcttctggctacacatttaccagttacaatatgcactgggtaaagcagacacctagacagggcctggaatggattggagctatttatccaggaaatggtgatacttcctacaatcagaagttcaagggcaaggccacactgactgtagacaaatcctccagcacagcctacatgcagctcagcagcctgacatctgaagactctgcggtctatttctgtgcaagagtggtgtactatagtaactcttactggtacttcgatgtctggggcacagggaccacggtcaccgtctctgatcagccagttccctcaactccacctaccccatctccctcaactccacctaccccatctccctcatgcgcacctgaactcctggggggaccgtcagtcttcctcttccccccaaaacccaaggacaccctcatgatctcccggacccctgaggtcacatgcgtggtggtggacgtgagccacgaagaccctgaggtcaagttcaactggtacgtggacggcgtggaggtgcataatgccaagacaaagccgcgggaggagcagtacaacagcacgtaccgtgtggtcagcgtcctcaccgtcctgcaccaggactggctgaatggcaaggagtacaagtgcaaggtctccaacaaagccctcccagcccccatcgagaaaacaatctccaaagccaaagggcagccccgagaaccacaggtgtacaccctgcccccatcccgggatgagctgaccaagaaccaggtcagcctgacctgcctggtcaaaggcttctatcccagcgacatcgccgtggagtgggagagcaatgggcagccggagaacaactacaagaccacgcctcccgtgctggactccgacggctccttcttcctctacagcaagctcaccgtggacaagagcaggtggcagcaggggaacgtcttctcatgctccgtgatgcatgaggctctgcacaaccactacacgcagaagagcctctccctgtctccgggtaaatgatctaga

SEQ ID NO: 60 - protein, 505 aa, Artificial sequence
  Description of Artificial Sequence: Synthetic amino acid sequence
MDFQVQIFSFLLISASVIIARGQIVLSQSPAILSASPGEKVTMTCRASSSVSYMHWYQQKPGSSPKPWIYAPSNLASGVPARFSGSGSGTSYSLTISRVEAEDAATYYCQQWSFNPPTFGAGTKLELKDGGGSGGGGSGGGGSSQAYLQQSGAELVRPGASVKMSCKASGYTFTSYNMHWVKQTPRQGLEWIGAIYPGNGDTSYNQKFKGKATLTVDKSSSTAYMQLSSLTSEDSAVYFCARVVYYSNSYWYFDVWGTGTTVTVSDQPVPSTPPTPSPSTPPTPSPSCAPELLGGPSVFLFPPKPKDTLMISRTPEVTCVVVDVSHEDPEVKFNWYVDGVEVHNAKTKPREEQYNSTYRVVSVLTVLHQDWLNGKEYKCKVSNKALPAPIEKTISKAKGQPREPQVYTLPPSRDELTKNQVSLTCLVKGFYPSDIAVEWESNGQPENNYKTTPPVLDSDGSFFLYSKLTVDKSRWQQGNVFSCSVMHEALHNHYTQKSLSLSPGK

SEQ ID NO: 61 - DNA, 1584 bp, Artificial sequence
  Description of Artificial Sequence: Synthetic nucleotide sequence
aagcttgccgccatggattttcaagtgcagattttcagcttcctgctaatcagtgcttcagtcataattgccagaggacaaattgttctctcccagtctccagcaatcctgtctgcatctccaggggagaaggtcacaatgacttgcagggccagctcaagtgtaagttacatgcactggtaccagcagaagccaggatcctcccccaaaccctggatttatgccccatccaacctggcttctggagtccctgctcgcttcagtggcagtgggtctgggacctcttactctctcacaatcagcagagtggaggctgaagatgctgccacttattactgccagcagtggagttttaacccacccacgttcggtgctgggaccaagctggagctgaaagatggcggtggctcgggcggtggtggatctggaggaggtgggagctctcaggcttatctacagcagtctggggctgagctggtgaggcctggggcctcagtgaagatgtcctgcaaggcttctggctacacatttaccagttacaatatgcactgggtaaagcagacacctagacagggcctggaatggattggagctatttatccaggaaatggtgatacttcctacaatcagaagttcaagggcaaggccacactgactgtagacaaatcctccagcacagcctacatgcagctcagcagcctgacatctgaagactctgcggtctatttctgtgcaagagtggtgtactatagtaactcttactggtacttcgatgtctggggcacagggaccacggtcaccgtctcttctgatcagccagttccctcaactccacctaccccatctccctcaactccacctaccccatctccctcatgctgccacccccgactgtcactgcaccgaccggccctcgaggacctgctcttaggttcagaagcgatcctcacgtgcacactgaccggcctgagagatgcctcaggtgtcaccttcacctggacgccctcaagtgggaagagcgctgttcaaggaccacctgaccgtgacctctgtggctgctacagcgtgtccagtgtcctgccgggctgtgccgagccatggaaccatgggaagaccttcacttgcactgctgcctaccccgagtccaagaccccgctaaccgccaccctctcaaaatccggaaacacattccggcccgaggtccacctgctgccgccgccgtcggaggagctggccctgaacgagctggtgacgctgacgtgcctggcacgtggcttcagccccaaggatgtgctggttcgctggctgcaggggtcacaggagctgccccgcgagaagtacctgacttgggcatcccggcaggagcccagccagggcaccaccaccttcgctgtgaccagcatactgcgcgtggcagccgaggactggaagaagggggacaccttctcctgcatggtgggccacgaggccctgccgctggccttcacacagaagaccatcgaccgcttggcgggtaaacccacccatgtcaatgtgtctgttgtcatggcggaggtggacggcacctgctactgataatctaga

SEQ ID NO: 62 - protein, 520 aa, Artificial sequence
  Description of Artificial Sequence: Synthetic amino acid sequence
MDFQVQIFSFLLISASVIIARGQIVLSQSPAILSASPGEKVTMTCRASSSVSYMHWYQQKPGSSPKPWIYAPSNLASGVPARFSGSGSGTSYSLTISRVEAEDAATYYCQQWSFNPPTFGAGTKLELKDGGGSGGGGSGGGGSSQAYLQQSGAELVRPGASVKMSCKASGYTFTSYNMHWVKQTPRQGLEWIGAIYPGNGDTSYNQKFKGKATLTVDKSSSTAYMQLSSLTSEDSAVYFCARVVYYSNSYWYFDVWGTGTTVTVSSDQPVPSTPPTPSPSTPPTPSPSCCHPRLSLHRPALEDLLLGSEAILTCTLTGLRDASGVTFTWTPSSGKSAVQGPPDRDLCGCYSVSSVLPGCAEPWNHGKTFTCTAAYPESKTPLTATLSKSGNTFRPEVHLLPPPSEELALNELVTLTCLARGFSPKDVLVRWLQGSQELPREKYLTWASRQEPSQGTTTFAVTSILRVAAEDWKKGDTFSCMVGHEALPLAFTQKTIDRLAGKPTHVNVSVVMAEVDGTCY

SEQ ID NO: 63 - DNA, 775 bp, Artificial Sequence
  Description of Artificial Sequence: Synthetic nucleotide sequence
tgatcagccagttccctcaactccacctaccccatctccctcaactccacctaccccatctccctcatgctgccacccccgactgtcactgcaccgaccggccctcgaggacctgctcttaggttcagaagcgatcctcacgtgcacactgaccggcctgagagatgcctcaggtgtcaccttcacctggacgccctcaagtgggaagagcgctgttcaaggaccacctgaccgtgacctctgtggctgctacagcgtgtccagtgtcctgccgggctgtgccgagccatggaaccatgggaagaccttcacttgcactgctgcctaccccgagtccaagaccccgctaaccgccaccctctcaaaatccggaaacacattccggcccgaggtccacctgctgccgccgccgtcggaggagctggccctgaacgagctggtgacgctgacgtgcctggcacgtggcttcagccccaaggatgtgctggttcgctggctgcaggggtcacaggagctgccccgcgagaagtacctgacttgggcatcccggcaggagcccagccagggcaccaccaccttcgctgtgaccagcatactgcgcgtggcagccgaggactggaagaagggggacaccttctcctgcatggtgggccacgaggccctgccgctggccttcacacagaagaccatcgaccgcttggcgggtaaacccacccatgtcaatgtgtctgttgtcatggcggaggtggacggcacctgctactgataatctaga

SEQ ID NO: 64 - protein, 254 aa, Artificial Sequence
  Description of Artificial Sequence: Synthetic amino acid sequence
DQPVPSTPPTPSPSTPPTPSPSCCHPRLSLHRPALEDLLLGSEAILTCTLTGLRDASGVTFTWTPSSGKSAVQGPPDRDLCGCYSVSSVLPGCAEPWNHGKTFTCTAAYPESKTPLTATLSKSGNTFRPEVHLLPPPSEELALNELVTLTCLARGFSPKDVLVRWLQGSQELPREKYLTWASRQEPSQGTTTFAVTSILRVAAEDWKKGDTFSCMVGHEALPLAFTQKTIDRLAGKPTHVNVSVVMAEVDGTCY

SEQ ID NO: 65 - DNA, 429 bp, Homo sapiens
agatctcaagaagatgaaaggattgttcttgttgacaacaaatgtaagtgtgcccggattacttccaggatcatccgttcttccgaagatcctaatgaggacattgtggagagaaacatccgaattattgttcctctgaacaacagggagaatatctctgatcccacctcaccattgagaaccagatttgtgtaccatttgtctgacctcagctgtaaaaaatgtgatcctacagaagtggagctggataatcagatagttactgctacccagagcaatatctgtgatgaagacagtgctacagagacctgctacacttatgacagaaacaagtgctacacagctgtggtcccactcgtatatggtggtgagaccaaaatggtggaaacagccttaaccccagatgcctgctatcctgactaatctaga

SEQ ID NO: 66 - protein, 139 aa, Homo sapiens
RSQEDERIVLVDNKCKCARITSRIIRSSEDPNEDIVERNIRIIVPLNNRENISDPTSPLRTRFVYHLSDLSCKKCDPTEVELDNQIVTATQSNICDEDSATETCYTYDRNKCYTAVVPLVYGGETKMVETALTPDACYP

SEQ ID NO: 67 - protein, 4 aa, Artificial sequence
  Description of Artificial Sequence: Synthetic amino acid sequence
GTCY

SEQ ID NO: 68 - DNA, 763 bp, Artificial sequence
  Description of Artificial Sequence: Synthetic nucleotide sequence
tgatcagccagttccctcaactccacctaccccatctccctcaactccacctaccccatctccctcatgctgccacccccgactgtcactgcaccgaccggccctcgaggacctgctcttaggttcagaagcgatcctcacgtgcacactgaccggcctgagagatgcctcaggtgtcaccttcacctggacgccctcaagtgggaagagcgctgttcaaggaccacctgaccgtgacctctgtggctgctacagcgtgtccagtgtcctgccgggctgtgccgagccatggaaccatgggaagaccttcacttgcactgctgcctaccccgagtccaagaccccgctaaccgccaccctctcaaaatccggaaacacattccggcccgaggtccacctgctgccgccgccgtcggaggagctggccctgaacgagctggtgacgctgacgtgcctggcacgtggcttcagccccaaggatgtgctggttcgctggctgcaggggtcacaggagctgccccgcgagaagtacctgacttgggcatcccggcaggagcccagccagggcaccaccaccttcgctgtgaccagcatactgcgcgtggcagccgaggactggaagaagggggacaccttctcctgcatggtgggccacgaggccctgccgctggccttcacacagaagaccatcgaccgcttggcgggtaaacccacccatgtcaatgtgtctgttgtcatggcggaggtggactgataatctaga

SEQ ID NO: 69 - protein, 250 aa, Artificial sequence
  Description of Artificial Sequence: Synthetic amino acid sequence
DQPVPSTPPTPSPSTPPTPSPSCCHPRLSLHRPALEDLLLGSEAILTCTLTGLRDASGVTFTWTPSSGKSAVQGPPDRDLCGCYSVSSVLPGCAEPWNHGKTFTCTAAYPESKTPLTATLSKSGNTFRPEVHLLPPPSEELALNELVTLTCLARGFSPKDVLVRWLQGSQELPREKYLTWASRQEPSQGTTTFAVTSILRVAAEDWKKGDTFSCMVGHEALPLAFTQKTIDRLAGKPTHVNVSVVMAEVD

SEQ ID NO: 70 - DNA, 1572 bp, Artificial sequence
  Description of Artificial Sequence: Synthetic nucleotide sequence
aagcttgccgccatggattttcaagtgcagattttcagcttcctgctaatcagtgcttcagtcataattgccagaggacaaattgttctctcccagtctccagcaatcctgtctgcatctccaggggagaaggtcacaatgacttgcagggccagctcaagtgtaagttacatgcactggtaccagcagaagccaggatcctcccccaaaccctggatttatgccccatccaacctggcttctggagtccctgctcgcttcagtggcagtgggtctgggacctcttactctctcacaatcagcagagtggaggctgaagatgctgccacttattactgccagcagtggagttttaacccacccacgttcggtgctgggaccaagctggagctgaaagatggcggtggctcgggcggtggtggatctggaggaggtgggagctctcaggcttatctacagcagtctggggctgagctggtgaggcctggggcctcagtgaagatgtcctgcaaggcttctggctacacatttaccagttacaatatgcactgggtaaagcagacacctagacagggcctggaatggattggagctatttatccaggaaatggtgatacttcctacaatcagaagttcaagggcaaggccacactgactgtagacaaatcctccagcacagcctacatgcagctcagcagcctgacatctgaagactctgcggtctatttctgtgcaagagtggtgtactatagtaactcttactggtacttcgatgtctggggcacagggaccacggtcaccgtctcttctgatcagccagttccctcaactccacctaccccatctccctcaactccacctaccccatctccctcatgctgccacccccgactgtcactgcaccgaccggccctcgaggacctgctcttaggttcagaagcgatcctcacgtgcacactgaccggcctgagagatgcctcaggtgtcaccttcacctggacgccctcaagtgggaagagcgctgttcaaggaccacctgaccgtgacctctgtggctgctacagcgtgtccagtgtcctgccgggctgtgccgagccatggaaccatgggaagaccttcacttgcactgctgcctaccccgagtccaagaccccgctaaccgccaccctctcaaaatccggaaacacattccggcccgaggtccacctgctgccgccgccgtcggaggagctggccctgaacgagctggtgacgctgacgtgcctggcacgtggcttcagccccaaggatgtgctggttcgctggctgcaggggtcacaggagctgccccgcgagaagtacctgacttgggcatcccggcaggagcccagccagggcaccaccaccttcgctgtgaccagcatactgcgcgtggcagccgaggactggaagaagggggacaccttctcctgcatggtgggccacgaggccctgccgctggccttcacacagaagaccatcgaccgcttggcgggtaaacccacccatgtcaatgtgtctgttgtcatggcggaggtggactgataatctaga

SEQ ID NO: 71 - protein, 516 aa, Artificial sequence
  Description of Artificial Sequence: Synthetic amino acid sequence
MDFQVQIFSFLLISASVIIARGQIVLSQSPAILSASPGEKVTMTCRASSSVSYMHWYQQKPGSSPKPWIYAPSNLASGVPARFSGSGSGTSYSLTISRVEAEDAATYYCQQWSFNPPTFGAGTKLELKDGGGSGGGGSGGGGSSQAYLQQSGAELVRPGASVKMSCKASGYTFTSYNMHWVKQTPRQGLEWIGAIYPGNGDTSYNQKFKGKATLTVDKSSSTAYMQLSSLTSEDSAVYFCARVVYYSNSYWYFDVWGTGTTVTVSSDQPVPSTPPTPSPSTPPTPSPSCCHPRLSLHRPALEDLLLGSEAILTCTLTGLRDASGVTFTWTPSSGKSAVQGPPDRDLCGCYSVSSVLPGCAEPWNHGKTFTCTAAYPESKTPLTATLSKSGNTFRPEVHLLPPPSEELALNELVTLTCLARGFSPKDVLVRWLQGSQELPREKYLTWASRQEPSQGTTTFAVTSILRVAAEDWKKGDTFSCMVGHEALPLAFTQKTIDRLAGKPTHVNVSVVMAEVD

SEQ ID NO: 72 - protein, 14 aa, Artificial sequence
  Description of Artificial Sequence: Synthetic peptide
PTHVNVSVVMAEVD

SEQ ID NO: 73 - DNA, 709 bp, Artificial sequence
  Description of Artificial Sequence: Synthetic nucleotide sequence
tgatcagccagttccctcaactccacctaccccatctccctcaactccacctaccccatctccctcatgctgccacccccgactgtcactgcaccgaccggccctcgaggacctgctcttaggttcagaagcgatcctcacgtgcacactgaccggcctgagagatgcctcaggtgtcaccttcacctggacgccctcaagtgggaagagcgctgttcaaggaccacctgaccgtgacctctgtggctgctacagcgtgtccagtgtcctgccgggctgtgccgagccatggaaccatgggaagaccttcacttgcactgctgcctaccccgagtccaagaccccgctaaccgccaccctctcaaaatccggaaacacattccggcccgaggtccacctgctgccgccgccgtcggaggagctggccctgaacgagctggtgacgctgacgtgcctggcacgtggcttcagccccaaggatgtgctggttcgctggctgcaggggtcacaggagctgccccgcgagaagtacctgacttgggcatcccggcaggagcccagccagggcaccaccaccttcgctgtgaccagcatactgcgcgtggcagccgaggactggaagaagggggacaccttctcctgcatggtgggccacgaggccctgccgctggccttcacacagaagaccatcgaccgcttggcgggtaaa

SEQ ID NO: 74 - protein, 236 aa, Artificial sequence
  Description of Artificial Sequence: Synthetic amino acid sequence
DQPVPSTPPTPSPSTPPTPSPSCCHPRLSLHRPALEDLLLGSEAILTCTLTGLRDASGVTFTWTPSSGKSAVQGPPDRDLCGCYSVSSVLPGCAEPWNHGKTFTCTAAYPESKTPLTATLSKSGNTFRPEVHLLPPPSEELALNELVTLTCLARGFSPKDVLVRWLQGSQELPREKYLTWASRQEPSQGTTTFAVTSILRVAAEDWKKGDTFSCMVGHEALPLAFTQKTIDRLAGK

SEQ ID NO: 75 - DNA, 1518 bp, Artificial Sequence
  Description of Artificial Sequence: Synthetic nucleotide sequence
aagcttgccgccatggattttcaagtgcagattttcagcttcctgctaatcagtgcttcagtcataattgccagaggacaaattgttctctcccagtctccagcaatcctgtctgcatctccaggggagaaggtcacaatgacttgcagggccagctcaagtgtaagttacatgcactggtaccagcagaagccaggatcctcccccaaaccctggatttatgccccatccaacctggcttctggagtccctgctcgcttcagtggcagtgggtctgggacctcttactctctcacaatcagcagagtggaggctgaagatgctgccacttattactgccagcagtggagttttaacccacccacgttcggtgctgggaccaagctggagctgaaagatggcggtggctcgggcggtggtggatctggaggaggtgggagctctcaggcttatctacagcagtctggggctgagctggtgaggcctggggcctcagtgaagatgtcctgcaaggcttctggctacacatttaccagttacaatatgcactgggtaaagcagacacctagacagggcctggaatggattggagctatttatccaggaaatggtgatacttcctacaatcagaagttcaagggcaaggccacactgactgtagacaaatcctccagcacagcctacatgcagctcagcagcctgacatctgaagactctgcggtctatttctgtgcaagagtggtgtactatagtaactcttactggtacttcgatgtctggggcacagggaccacggtcaccgtctcttctgatcagccagttccctcaactccacctaccccatctccctcaactccacctaccccatctccctcatgctgccacccccgactgtcactgcaccgaccggccctcgaggacctgctcttaggttcagaagcgatcctcacgtgcacactgaccggcctgagagatgcctcaggtgtcaccttcacctggacgccctcaagtgggaagagcgctgttcaaggaccacctgaccgtgacctctgtggctgctacagcgtgtccagtgtcctgccgggctgtgccgagccatggaaccatgggaagaccttcacttgcactgctgcctaccccgagtccaagaccccgctaaccgccaccctctcaaaatccggaaacacattccggcccgaggtccacctgctgccgccgccgtcggaggagctggccctgaacgagctggtgacgctgacgtgcctggcacgtggcttcagccccaaggatgtgctggttcgctggctgcaggggtcacaggagctgccccgcgagaagtacctgacttgggcatcccggcaggagcccagccagggcaccaccaccttcgctgtgaccagcatactgcgcgtggcagccgaggactggaagaagggggacaccttctcctgcatggtgggccacgaggccctgccgctggccttcacacagaagaccatcgaccgcttggcgggtaaa

SEQ ID NO: 76 - protein, 502 aa, Artificial sequence
  Description of Artificial Sequence: Synthetic amino acid sequence
MDFQVQIFSFLLISASVIIARGQIVLSQSPAILSASPGEKVTMTCRASSSVSYMHWYQQKPGSSPKPWIYAPSNLASGVPARFSGSGSGTSYSLTISRVEAEDAATYYCQQWSFNPPTFGAGTKLELKDGGGSGGGGSGGGGSSQAYLQQSGAELVRPGASVKMSCKASGYTFTSYNMHWVKQTPRQGLEWIGAIYPGNGDTSYNQKFKGKATLTVDKSSSTAYMQLSSLTSEDSAVYFCARVVYYSNSYWYFDVWGTGTTVTVSSDQPVPSTPPTPSPSTPPTPSPSCCHPRLSLHRPALEDLLLGSEAILTCTLTGLRDASGVTFTWTPSSGKSAVQGPPDRDLCGCYSVSSVLPGCAEPWNHGKTFTCTAAYPESKTPLTATLSKSGNTFRPEVHLLPPPSEELALNELVTLTCLARGFSPKDVLVRWLQGSQELPREKYLTWASRQEPSQGTTTFAVTSILRVAAEDWKKGDTFSCMVGHEALPLAFTQKTIDRLAGK

SEQ ID NO: 77 - DNA, 924 bp, Artificial Sequence
  Description of Artificial Sequence: Synthetic nucleotide sequence
gcaacctacatgatggggaatgagttgaccttcctagatgattccatctgcacgggcacctccagtggaaatcaagtgaacctcactatccaaggactgagggccatggacacgggactctacatctgcaaggtggagctcatgtacccaccgccatactacctgggcataggcaacggaacccagatttatgtaattgatccagaaccgtgcccagattctgatcaacccaaatcttgtgacaaaactcacacatgcccaccgtgcccagcacctgaactcctggggggaccgtcagtcttcctcttccccccaaaacccaaggacaccctcatgatctcccggacccctgaggtcacatgcgtggtggtggacgtgagccacgaagaccctgaggtcaagttcaactggtacgtggacggcgtggaggtgcataatgccaagacaaagccgcgggaggagcagtacaacagcacgtaccgtgtggtcagcgtcctcaccgtcctgcaccaggactggctgaatggcaaggagtacaagtgcaaggtctccaacaaagccctcccagcccccatcgagaaaacaatctccaaagccaaagggcagccccgagaaccacaggtgtacaccctgcccccatcccgggatgagctgaccaagaaccaggtcagcctgacctgcctggtcaaaggcttctatcccagcgacatcgccgtggagtgggagagcaatgggcagccggagaacaactacaagaccacgcctcccgtgctggactccgacggctccttcttcctctacagcaagctcaccgtggacaagagcaggtggcagcaggggaacgtcttctcatgctccgtgatgcatgaggctctgcacaaccactacacgcagaagagcctctccctgtctccgggtaaatga

SEQ ID NO: 78 - protein, 382 aa, Artificial sequence
  Description of Artificial Sequence: Synthetic amino acid sequence
MGVLLTQRTLLSLVLALLFPSMASMAMHVAQPAVVLASSRGIASFVCEYASPGKATEVRVTVLRQADSQVTEVCAATYMMGNELTFLDDSICTGTSSGNQVNLTIQGLRAMDTGLYICKVELMYPPPYYLGIGNGTQIYVIDPEPCPDSDQPKSCDKTHTCPPCPAPELLGGPSVFLFPPKPKDTLMISRTPEVTCVVVDVSHEDPEVKFNWYVDGVEVHNAKTKPREEQYNSTYRVVSVLTVLHQDWLNGKEYKCKVSNKALPAPIEKTISKAKGQPREPQVYTLPPSRDELTKNQVSLTCLVKGFYPSDIAVEWESNGQPENNYKTTPPVLDSDGSFFLYSKLTVDKSRWQQGNVFSCSVMHEALHNHYTQKSLSLSPGK

SEQ ID NO: 79 - DNA, 453 bp, Homo sapiens
atgggggtactgctcacacagaggacgctgctcagtctggtccttgcactcctgtttccaagcatggcgagcatggcaatgcacgtggcccagcctgctgtggtactggccagcagccgaggcatcgccagctttgtgtgtgagtatgcatctccaggcaaagccactgaggtccgggtgacagtgcttcggcaggctgacagccaggtgactgaagtctgtgcggcaacctacatgatggggaatgagttgaccttcctagatgattccatctgcacgggcacctccagtggaaatcaagtgaacctcactatccaaggactgagggccatggacacgggactctacatctgcaaggtggagctcatgtacccaccgccatactacctgggcataggcaacggaacccagatttatgtaattgatccagaaccgtgcccagattctgatcaa

SEQ ID NO: 80 - protein, 151 aa, Homo sapiens
MGVLLTQRTLLSLVLALLFPSMASMAMHVAQPAVVLASSRGIASFVCEYASPGKATEVRVTVLRQADSQVTEVCAATYMMGNELTFLDDSICTGTSSGNQVNLTIQGLRAMDTGLYICKVELMYPPPYYLGIGNGTQIYVIDPEPCPDSDQ

SEQ ID NO: 81 - DNA, 75 bp, Homo sapiens
atgggggtactgctcacacagaggacgctgctcagtctggtccttgcactcctgtttccaagcatggcgagcatg

SEQ ID NO: 82 - protein, 22 aa, Homo sapiens
MGVLLTQRTLLSLVLALLFPSM

SEQ ID NO: 83 - DNA, 372 bp, Homo sapiens
gcaatgcacgtggcccagcctgctgtggtactggccagcagccgaggcatcgccagctttgtgtgtgagtatgcatctccaggcaaagccactgaggtccgggtgacagtgcttcggcaggctgacagccaggtgactgaagtctgtgcggcaacctacatgacggggaatgagttgaccttcctagatgattccatctgcacgggcacctccagtggaaatcaagtgaacctcactatccaaggactgagggccatggacacgggactctacatctgcaaggtggagctcatgtacccaccgccatactacctgggcataggcaacggaacccagatttatgtaattgatccagaaccgtgcccagattct

SEQ ID NO: 84 - protein, 124 aa, Homo sapiens
AMHVAQPAVVLASSRGIASFVCEYASPGKATEVRVTVLRQADSQVTEVCAATYMTGNELTFLDDSICTGTSSGNQVNLTIQGLRAMDTGLYICKVELMYPPPYYLGIGNGTQIYVIDPEPCPDS

SEQ ID NO: 85 - DNA, 1149 bp, Homo sapiens
atgggggtactgctcacacagaggacgctgctcagtctggtccttgcactcctgtttccaagcatggcgagcatggcaatgcacgtggcccagcctgctgtggtactggccagcagccgaggcatcgccagctttgtgtgtgagtatgcatctccaggcaaagccactgaggtccgggtgacagtgcttcggcaggctgacagccaggtgactgaagtctgtgcggcaacctacatgatggggaatgagttgaccttcctagatgattccatctgcacgggcacctccagtggaaatcaagtgaacctcactatccaaggactgagggccatggacacgggactctacatctgcaaggtggagctcatgtacccaccgccatactacctgggcataggcaacggaacccagatttatgtaattgatccagaaccgtgcccagattctgatcaacccaaatcttctgacaaaactcacacatccccaccgtccccagcacctgaactcctggggggatcgtcagtcttcctcttccccccaaaacccaaggacaccctcatgatctcccggacccctgaggtcacatgcgtggtggtggacgtgagccacgaagaccctgaggtcaagttcaactggtacgtggacggcgtggaggtgcataatgccaagacaaagccgcgggaggagcagtacaacagcacgtaccgtgtggtcagcgtcctcaccgtcctgcaccaggactggctgaatggcaaggagtacaagtgcaaggtctccaacaaagccctcccagcccccatcgagaaaacaatctccaaagccaaagggcagccccgagaaccacaggtgtacaccctgcccccatcccgggatgagctgaccaagaaccaggtcagcctgacctgcctggtcaaaggcttctatcccagcgacatcgccgtggagtgggagagcaatgggcagccggagaacaactacaagaccacgcctcccgtgctggactccgacggctccttcttcctctacagcaagctcaccgtggacaagagcaggtggcagcaggggaacgtcttctcatgctccgtgatgcatgaggctctgcacaaccactacacgcagaagagcctctccctgtctccgggtaaatga

SEQ ID NO: 86 - protein, 382 aa, Homo sapiens
MGVLLTQRTLLSLVLALLFPSMASMAMHVAQPAVVLASSRGIASFVCEYASPGKATEVRVTVLRQADSQVTEVCAATYMMGNELTFLDDSICTGTSSGNQVNLTIQGLRAMDTGLYICKVELMYPPPYYLGIGNGTQIYVIDPEPCPDSDQPKSSDKTHTSPPSPAPELLGGSSVFLFPPKPKDTLMISRTPEVTCVVVDVSHEDPEVKFNWYVDGVEVHNAKTKPREEQYNSTYRVVSVLTVLHQDWLNGKEYKCKVSNKALPAPIEKTISKAKGQPREPQVYTLPPSRDELTKNQVSLTCLVKGFYPSDIAVEWESNGQPENNYKTTPPVLDSDGSFFLYSKLTVDKSRWQQGNVFSCSVMHEALHNHYTQKSLSLSPGK

SEQ ID NO: 87 - DNA, 1221 bp, Artificial Sequence
  Description of Artificial Sequence: Synthetic nucleotide sequence
atgggggtactgctcacacagaggacgctgctcagtctggtccttgcactcctgtttccaagcatggcgagcatggcaatgcacgtggcccagcctgctgtggtactggccagcagccgaggcatcgccagctttgtgtgtgagtatgcatctccaggcaaagccactgaggtccgggtgacagtgcttcggcaggctgacagccaggtgactgaagtctgtgcggcaacctacatgatggggaatgagttgaccttcctagatgattccatctgcacgggcacctccagtggaaatcaagtgaacctcactatccaaggactgagggccatggacacgggactctacatctgcaaggtggagctcatgtacccaccgccatactacctgggcataggcaacggaacccagatttatgtaattgatccagaaccgtgcccagattctgatcagccagttccctcaactccacctaccccatctccctcaactccacctaccccatctccctcatgctgccacccccgactgtcactgcaccgaccggccctcgaggacctgctcttaggttcagaagcgatcctcacgtgcacactgaccggcctgagagatgcctcaggtgtcaccttcacctggacgccctcaagtgggaagagcgctgttcaaggaccacctgaccgtgacctctgtggctgctacagcgtgtccagtgtcctgccgggctgtgccgagccatggaaccatgggaagaccttcacttgcactgctgcctaccccgagtccaagaccccgctaaccgccaccctctcaaaatccggaaacacattccggcccgaggtccacctgctgccgccgccgtcggaggagctggccctgaacgagctggtgacgctgacgtgcctggcacgtggcttcagccccaaggatgtgctggttcgctggctgcaggggtcacaggagctgccccgcgagaagtacctgacttgggcatcccggcaggagcccagccagggcaccaccaccttcgctgtgaccagcatactgcgcgtggcagccgaggactggaagaagggggacaccttctcctgcatggtgggccacgaggccctgccgctggccttcacacagaagaccatcgaccgcttggcgggtaaacccacccatgtcaatgtgtctgttgtcatggcggaggtggacggcacctgctactgataatctaga

SEQ ID NO: 88 - protein, 403 aa, Artificial sequence
  Description of Artificial Sequence: Synthetic amino acid sequence
MGVLLTQRTLLSLVLALLFPSMASMAMHVAQPAVVLASSRGIASFVCEYASPGKATEVRVTVLRQADSQVTEVCAATYMMGNELTFLDDSICTGTSSGNQVNLTIQGLRAMDTGLYICKVELMYPPPYYLGIGNGTQIYVIDPEPCPDSDQPVPSTPPTPSPSTPPTPSPSCCHPRLSLHRPALEDLLLGSEAILTCTLTGLRDASGVTFTWTPSSGKSAVQGPPDRDLCGCYSVSSVLPGCAEPWNHGKTFTCTAAYPESKTPLTATLSKSGNTFRPEVHLLPPPSEELALNELVTLTCLARGFSPKDVLVRWLQGSQELPREKYLTWASRQEPSQGTTTFAVTSILRVAAEDWKKGDTFSCMVGHEALPLAFTQKTIDRLAGKPTHVNVSVVMAEVDGTCY

SEQ ID NO: 89 - DNA, 1209 bp, Artificial Sequence
  Description of Artificial Sequence: Synthetic nucleotide sequence
atgggggtactgctcacacagaggacgctgctcagtctggtccttgcactcctgtttccaagcatggcgagcatggcaatgcacgtggcccagcctgctgtggtactggccagcagccgaggcatcgccagctttgtgtgtgagtatgcatctccaggcaaagccactgaggtccgggtgacagtgcttcggcaggctgacagccaggtgactgaagtctgtgcggcaacctacatgatggggaatgagttgaccttcctagatgattccatctgcacgggcacctccagtggaaatcaagtgaacctcactatccaaggactgagggccatggacacgggactctacatctgcaaggtggagctcatgtacccaccgccatactacctgggcataggcaacggaacccagatttatgtaattgatccagaaccgtgcccagattctgatcagccagttccctcaactccacctaccccatctccctcaactccacctaccccatctccctcatgctgccacccccgactgtcactgcaccgaccggccctcgaggacctgctcttaggttcagaagcgatcctcacgtgcacactgaccggcctgagagatgcctcaggtgtcaccttcacctggacgccctcaagtgggaagagcgctgttcaaggaccacctgaccgtgacctctgtggctgctacagcgtgtccagtgtcctgccgggctgtgccgagccatggaaccatgggaagaccttcacttgcactgctgcctaccccgagtccaagaccccgctaaccgccaccctctcaaaatccggaaacacattccggcccgaggtccacctgctgccgccgccgtcggaggagctggccctgaacgagctggtgacgctgacgtgcctggcacgtggcttcagccccaaggatgtgctggttcgctggctgcaggggtcacaggagctgccccgcgagaagtacctgacttgggcatcccggcaggagcccagccagggcaccaccaccttcgctgtgaccagcatactgcgcgtggcagccgaggactggaagaagggggacaccttctcctgcatggtgggccacgaggccctgccgctggccttcacacagaagaccatcgaccgcttggcgggtaaacccacccatgtcaatgtgtctgttgtcatggcggaggtggactgataatctaga

SEQ ID NO: 90 - protein, 399 aa, Artificial sequence
  Description of Artificial Sequence: Synthetic amino acid sequence
MGVLLTQRTLLSLVLALLFPSMASMAMHVAQPAVVLASSRGIASFVCEYASPGKATEVRVTVLRQADSQVTEVCAATYMMGNELTFLDDSICTGTSSGNQVNLTIQGLRAMDTGLYICKVELMYPPPYYLGIGNGTQIYVIDPEPCPDSDQPVPSTPPTPSPSTPPTPSPSCCHPRLSLHRPALEDLLLGSEAILTCTLTGLRDASGVTFTWTPSSGKSAVQGPPDRDLCGCYSVSSVLPGCAEPWNHGKTFTCTAAYPESKTPLTATLSKSGNTFRPEVHLLPPPSEELALNELVTLTCLARGFSPKDVLVRWLQGSQELPREKYLTWASRQEPSQGTTTFAVTSILRVAAEDWKKGDTFSCMVGHEALPLAFTQKTIDRLAGKPTHVNVSVVMAEVD

SEQ ID NO: 91 - DNA, 328 bp, Homo sapiens
cctgaactcctggggggatcgtcagtcttcctcttccccccaaaacccaaggacaccctcatgatctcccggacccctgaggtcacatgcgtggtggtggacgtgagccacgaagaccctgaggtcaagttcaactggtacgtggacggcgtggaggtgcataatgccaagacaaagccgcgggaggagcagtacaacagcacgtaccgtgtggtcagcgtcctcaccgtcctgcaccaggactggctgaatggcaaggagtacaagtgcaaggtctccaacaaagccctcccagcccccatcgagaaaaccatctccaaagccaaag

SEQ ID NO: 92 - protein, 109 aa, Homo sapiens
PELLGGSSVFLFPPKPKDTLMISRTPEVTCVVVDVSHEDPEVKFNWYVDGVEVHNAKTKPREEQYNSTYRVVSVLTVLHQDWLNGKEYKCKVSNKALPAPIEKTISKAK

SEQ ID NO: 93 - protein, 10 aa, Artificial sequence
  Description of Artificial Sequence: Synthetic peptide
PAPELLGGPS

SEQ ID NO: 94 - protein, 10 aa, Artificial sequence
  Description of Artificial Sequence: Synthetic peptide
PAPELLGGSS

SEQ ID NO: 95 - DNA, 51 bp, Artificial sequence
  Description of Artificial Sequence: Synthetic nucleotide sequence
gttgttttcgaaggatccgctttaccgggatttacagacaccgctcgctgg

SEQ ID NO: 96 - DNA, 996 bp, Homo sapiens
tgatcacgtctgctccagggacttcaccccgcccaccgtgaagatcttacagtcgtcctgcgacggcggcgggcacttccccccgaccatccagctcctgtgcctcgtctctgggtacaccccagggactatcaacatcacctggctggaggacgggcaggtcatggacgtggacttgtccaccgcctctaccacgcaggagggtgagctggcctccacacaaagcgagctcaccctcagccagaagcactggctgtcagaccgcacctacacctgccaggtcacctatcaaggtcacacctttgaggacagcaccaagaagtgtgcagattccaacccgagaggggtgagcgcctacctaagccggcccagcccgttcgacctgttcatccgcaagtcgcccacgatcacctgtctggtggtggacctggcacccagcaaggggaccgtgaacctgacctggtcccgggccagtgggaagcctgtgaaccactccaccagaaaggaggagaagcagcgcaatggcacgttaaccgtcacgtccaccctgccggtgggcacccgagactggatcgagggggagacctaccagtgcagggtgacccacccccacctgcccagggccctcatgcggtccacgaccaagaccagcggcccgcgtgctgccccggaagtctatgcgtttgcgacgccggagtggccggggagccgggacaagcgcaccctcgcctgcctgatccagaacttcatgcctgaggacatctcggtgcagtggctgcacaacgaggtgcagctcccggacgcccggcacagcacgacgcagccccgcaagaccaagggctccggcttcttcgtcttcagccgcctggaggtgaccagggccgaatgggagcagaaagatgagttcatctgccgtgcagtccatgaggcagcgagcccctcacagaccgtccagcgagcggtgtctgtaaatcccggtaaagcggatccttcgaa

SEQ ID NO: 97 - protein, 331 aa, Homo sapiens
DHVCSRDFTPPTVKILQSSCDGGGHFPPTIQLLCLVSGYTPGTINITWLEDGQVMDVDLSTASTTQEGELASTQSELTLSQKHWLSDRTYTCQVTYQGHTFEDSTKKCADSNPRGVSAYLSRPSPFDLFIRKSPTITCLVVDLAPSKGTVNLTWSRASGKPVNHSTRKEEKQRNGTLTVTSTLPVGTRDWIEGETYQCRVTHPHLPRALMRSTTKTSGPRAAPEVYAFATPEWPGSRDKRTLACLIQNFMPEDISVQWLHNEVQLPDARHSTTQPRKTKGSGFFVFSRLEVTRAEWEQKDEFICRAVHEAASPSQTVQRAVSVNPGKADPS

SEQ ID NO: 98 - DNA, 63 bp, Artificial sequence
  Description of Artificial Sequence: Synthetic nucleotide sequence
gttgtttgatcaggagcccaaatcttgtgacaaaactcacacatgcccaccgtgcccagcacc

SEQ ID NO: 99 - DNA, 91 bp, Artificial sequence
  Description of Artificial Sequence: Synthetic nucleotide sequence
gttgttgatcaggagcccaaatcttctgacaaaactcacacatctccaccgtccccagcacctgaactcctgggtggaccgtcagtcttcc

SEQ ID NO: 100 - DNA, 339 bp, Artificial sequence
  Description of Artificial Sequence: Synthetic nucleotide sequence
caggtgcagctgaaggaggcaggacctggcctggtgcaaccgacacagaccctgtccctcacatgcactgtctctgggttctcattaaccagcgatggtgtacactggattcgacagcctccaggaaagggtctggaatggatgggaataatatattatgatggaggcacagattataattcagcaattaaatccagactgagcatcagcagggacacctccaagagccaagttttcttaaaaatcaacagtctgcaaactgatgacacagccatgtattactgtgccagaatccactttgattactggggccaaggagtcatggtcacagtctcctct

SEQ ID NO: 101 - protein, 113 aa, Artificial sequence
  Description of Artificial Sequence: Synthetic amino acid sequence
QVQLKEAGPGLVQPTQTLSLTCTVSGFSLTSDGVHWIRQPPGKGLEWMGIIYYDGGTDYNSAIKSRLSISRDTSKSQVFLKINSLQTDDTAMYYCARIHFDYWGQGVMVTVSS

SEQ ID NO: 102 - DNA, 321 bp, Artificial sequence
  Description of Artificial Sequence: Synthetic nucleotide sequence
gacattgtgctcactcagtctccaacaaccatagctgcatctccaggggagaaggtcaccatcacctgccgtgccagctccagtgtaagttacatgtactggtaccagcagaagtcaggcgcctcccctaaactctggatttatgacacatccaagctggcttctggagttccaaatcgcttcagtggcagtgggtctgggacctcttattctctcgcaatcaacaccatggagactgaagatgctgccacttattactgtcagcagtggagtagtactccgctcacgttcgggtctgggaccaagctggagatcaaacgg

SEQ ID NO: 103 - protein, 107 aa, Artificial sequence
  Description of Artificial Sequence: Synthetic amino acid sequence
DIVLTQSPTTIAASPGEKVTITCRASSSVSYMYWYQQKSGASPKLWIYDTSKLASGVPNRFSGSGSGTSYSLAINTMETEDAATYYCQQWSSTPLTFGSGTKLEIKR

SEQ ID NO: 104 - DNA, 785 bp, Artificial sequence
  Description of Artificial Sequence: Synthetic nucleotide sequence
aagcttatggattttcaagtgcagattttcagcttcctgctaatcagtgcttcagtcataatgtccagaggagtcgacattgtgctcactcagtctccaacaaccatagctgcatctccaggggagaaggtcaccatcacctgccgtgccagctccagtgtaagttacatgtactggtaccagcagaagtcaggcgcctcccctaaactctggatttatgacacatccaagctggcttctggagttccaaatcgcttcagtggcagtgggtctgggacctcttattctctcgcaatcaacaccatggagactgaagatgctgccacttattactgtcagcagtggagtagtactccgctcacgttcgggtctgggaccaagctggagatcaaacggggtggcggtggctcgggcggtggtgggtcgggtggcggcggatctcaggtgcagctgaaggaggcaggacctggcctggtgcaaccgacacagaccctgtccctcacatgcactgtctctgggttctcattaaccagcgatggtgtacactggattcgacagcctccaggaaagggtctggaatggatgggaataatatattatgatggaggcacagattataattcagcaattaaatccagactgagcatcagcagggacacctccaagagccaagttttcttaaaaatcaacagtctgcaaactgatgacacagccatgtattactgtgccagaatccactttgattactggggccaaggagtcatggtcacagtctcctctgatca

SEQ ID NO: 105 - protein, 258 aa, Artificial sequence
  Description of Artificial Sequence: Synthetic amino acid sequence
MDFQVQIFSFLLISASVIMSRGVDIVLTQSPTTIAASPGEKVTITCRASSSVSYMYWYQQKSGASPKLWIYDTSKLASGVPNRFSGSGSGTSYSLAINTMETEDAATYYCQQWSSTPLTFGSGTKLEIKRGGGGSGGGGSGGGGSQVQLKEAGPGLVQPTQTLSLTCTVSGFSLTSDGVHWIRQPPGKGLEWMGIIYYDGGTDYNSAIKSRLSISRDTSKSQVFLKINSLQTDDTAMYYCARIHFDYWGQGVMVTVSS

SEQ ID NO: 106 - DNA, 1491 bp, Artificial sequence
  Description of Artificial Sequence: Synthetic nucleotide sequence
aagcttatggattttcaagtgcagattttcagcttcctgctaatcagtgcttcagtcataatgtccagaggagtcgacattgtgctcactcagtctccaacaaccatagctgcatctccaggggagaaggtcaccatcacctgccgtgccagctccagtgtaagttacatgtactggtaccagcagaagtcaggcgcctcccctaaactctggatttatgacacatccaagctggcttctggagttccaaatcgcttcagtggcagtgggtctgggacctcttattctctcgcaatcaacaccatggagactgaagatgctgccacttattactgtcagcagtggagtagtactccgctcacgttcgggtctgggaccaagctggagatcaaacggggtggcggtggctcgggcggtggtgggtcgggtggcggcggatctcaggtgcagctgaaggaggcaggacctggcctggtgcaaccgacacagaccctgtccctcacatgcactgtctctgggttctcattaaccagcgatggtgtacactggattcgacagcctccaggaaagggtctggaatggatgggaataatatattatgatggaggcacagattataattcagcaattaaatccagactgagcatcagcagggacacctccaagagccaagttttcttaaaaatcaacagtctgcaaactgatgacacagccatgtattactgtgccagaatccactttgattactggggccaaggagtcatggtcacagtctcctctgatcaggagcccaaatcttgtgacaaaactcacacatgcccaccgtgcccagcacctgaactcctggggggaccgtcagtcttcctcttccccccaaaacccaaggacaccctcatgatctcccggacccctgaggtcacatgcgtggtggtggacgtgagccacgaagaccctgaggtcaagttcaactggtacgtggacggcgtggaggtgcataatgccaagacaaagccgcgggaggagcagtacaacagcacgtaccgtgtggtcagcgtcctcaccgtcctgcaccaggactggctgaatggcaaggagtacaagtgcaaggtctccaacaaagccctcccagcccccatcgagaaaacaatctccaaagccaaagggcagccccgagaaccacaggtgtacaccctgcccccatcccgggatgagctgaccaagaaccaggtcagcctgacctgcctggtcaaaggcttctatcccagcgacatcgccgtggagtgggagagcaatgggcagccggagaacaactacaagaccacgcctcccgtgctggactccgacggctccttcttcctctacagcaagctcaccgtggacaagagcaggtggcagcaggggaacgtcttctcatgctccgtgatgcatgaggctctgcacaaccactacacgcagaagagcctctccctgtctccgggtaaatgatctaga

SEQ ID NO: 107 - protein, 492 aa, Artificial sequence
  Description of Artificial Sequence: Synthetic amino acid sequence
MDFQVQIFSFLLISASVIMSRGVDIVLTQSPTTIAASPGEKVTITCRASSSVSYMYWYQQKSGASPKLWIYDTSKLASGVPNRFSGSGSGTSYSLAINTMETEDAATYYCQQWSSTPLTFGSGTKLEIKRGGGGSGGGGSGGGGSQVQLKEAGPGLVQPTQTLSLTCTVSGFSLTSDGVHWIRQPPGKGLEWMGIIYYDGGTDYNSAIKSRLSISRDTSKSQVFLKINSLQTDDTAMYYCARIHFDYWGQGVMVTVSSDQEPKSCDKTHTCPPCPAPELLGGPSVFLFPPKPKDTLMISRTPEVTCVVVDVSHEDPEVKFNWYVDGVEVHNAKTKPREEQYNSTYRVVSVLTVLHQDWLNGKEYKCKVSNKALPAPIEKTISKAKGQPREPQVYTLPPSRDELTKNQVSLTCLVKGFYPSDIAVEWESNGQPENNYKTTPPVLDSDGSFFLYSKLTVDKSRWQQGNVFSCSVMHEALHNHYTQKSLSLSPGK

SEQ ID NO: 108 - DNA, 1645 bp, Artificial sequence
  Description of Artificial Sequence: Synthetic nucleotide sequence
aagcttatggattttcaagtgcagattttcagcttcctgctaatcagtgcttcagtcataatgtccagaggagtcgacattgtgctcactcagtctccaacaaccatagctgcatctccaggggagaaggtcaccatcacctgccgtgccagctccagtgtaagttacatgtactggtaccagcagaagtcaggcgcctcccctaaactctggatttatgacacatccaagctggcttctggagttccaaatcgcttcagtggcagtgggtctgggacctcttattctctcgcaatcaacaccatggagactgaagatgctgccacttattactgtcagcagtggagtagtactccgctcacgttcgggtctgggaccaagctggagatcaaacggggtggcggtggctcgggcggtggtgggtcgggtggcggcggatctcaggtgcagctgaaggaggcaggacctggcctggtgcaaccgacacagaccctgtccctcacatgcactgtctctgggttctcattaaccagcgatggtgtacactggattcgacagcctccaggaaagggtctggaatggatgggaataatatattatgatggaggcacagattataattcagcaattaaatccagactgagcatcagcagggacacctccaagagccaagttttcttaaaaatcaacagtctgcaaactgatgacacagccatgtattactgtgccagaatccactttgattactggggccaaggagtcatggtcacagtctcctctgatctggagcccaaatcttctgacaaaactcacacaagcccaccgagcccagcacctgaactcctggggggatcgtcagtcttcctcttccccccaaaacccaaggacaccctcatgatctcccggacccctgaggtcacatgcgtggtggtggacgtgagccacgaagaccctgaggtcaagttcaactggtacgtggacggcgtggaggtgcataatgccaagacaaagccgcgggaggagcagtacaacagcacgtaccgtgtggtcagcgtcctcaccgtcctgcaccaggactggctgaatggcaaggagtacaagtgcaaggtctccaacaaagccctcccagcccccatcgagaaaaccatctccaaagccaaagggcagccccgagaaccacaggtgtacaccctgcccccatcccgggatgagctgaccaagaaccaggtcagcctgacctgcctggtcaaaggcttctatcccagcgacatcgccgtggagtgggagagcaatgggcagccggagaacaactacaagaccacgcctcccgtgctggactccgacggctccttcttcctctacagcaagctcaccgtggacaagagcaggtggcagcaggggaacgtcttctcatgctccgtgatgcatgaggctctgcacaaccactacacgcagaagagcctctccctgtctccgggtaaagcggatccttcgaacctgctcccatcctgggccattaccttaatctcagtaaatggaatttttgtgatatgctgcctgacctactgctttgccccaagatgcagagagagaaggaggaatgagagattgagaagggaaagtgtacgccctgtataaatcgata

SEQ ID NO: 109 - protein, 543 aa, Artificial sequence
  Description of Artificial Sequence: Synthetic amino acid sequence
MDFQVQIFSFLLISASVIMSRGVDIVLTQSPTTIAASPGEKVTITCRASSSVSYMYWYQQKSGASPKLWIYDTSKLASGVPNRFSGSGSGTSYSLAINTMETEDAATYYCQQWSSTPLTFGSGTKLEIKRGGGGSGGGGSGGGGSQVQLKEAGPGLVQPTQTLSLTCTVSGFSLTSDGVHWIRQPPGKGLEWMGIIYYDGGTDYNSAIKSRLSISRDTSKSQVFLKINSLQTDDTAMYYCARIHFDYWGQGVMVTVSSDLEPKSSDKTHTSPPSPAPELLGGSSVFLFPPKPKDTLMISRTPEVTCVVVDVSHEDPEVKFNWYVDGVEVHNAKTKPREEQYNSTYRVVSVLTVLHQDWLNGKEYKCKVSNKALPAPIEKTISKAKGQPREPQVYTLPPSRDELTKNQVSLTCLVKGFYPSDIAVEWESNGQPENNYKTTPPVLDSDGSFFLYSKLTVDKSRWQQGNVFSCSVMHEALHNHYTQKSLSLSPGKADPSNLLPSWAITLISVNGIFVICCLTYCFAPRCRERRRNERLRRESVRPV

SEQ ID NO: 110 - DNA, 1645 bp, Artificial sequence
  Description of Artificial Sequence: Synthetic nucleotide sequence
aagcttatggattttcaagtgcagattttcagcttcctgctaatcagtgcttcagtcataatgtccagaggagtcgacattgtgctcactcagtctccaacaaccatagctgcatctccaggggagaaggtcaccatcacctgccgtgccagctccagtgtaagttacatgtactggtaccagcagaagtcaggcgcctcccctaaactctggatttatgacacatccaagctggcttctggagttccaaatcgcttcagtggcagtgggtctgggacctcttattctctcgcaatcaacaccatggagactgaagatgctgccacttattactgtcagcagtggagtagtactccgctcacgttcgggtctgggaccaagctggagatcaaacggggtggcggtggctcgggcggtggtgggtcgggtggcggcggatctcaggtgcagctgaaggaggcaggacctggcctggtgcaaccgacacagaccctgtccctcacatgcactgtctctgggttctcattaaccagcgatggtgtacactggattcgacagcctccaggaaagggtctggaatggatgggaataatatattatgatggaggcacagattataattcagcaattaaatccagactgagcatcagcagggacacctccaagagccaagttttcttaaaaatcaacagtctgcaaactgatgacacagccatgtattactgtgccagaatccactttgattactggggccaaggagtcatggtcacagtctcctctgatctggagcccaaatcttgtgacaaaactcacacatgcccaccgtgcccagcacctgaactcctggggggaccgtcagtcttcctcttccccccaaaacccaaggacaccctcatgatctcccggacccctgaggtcacatgcgtggtggtggacgtgagccacgaagaccctgaggtcaagttcaactggtacgtggacggcgtggaggtgcataatgccaagacaaagccgcgggaggagcagtacaacagcacgtaccgtgtggtcagcgtcctcaccgtcctgcaccaggactggctgaatggcaaggagtacaagtgcaaggtctccaacaaagccctcccagcccccatcgagaaaaccatctccaaagccaaagggcagccccgagaaccacaggtgtacaccctgcccccatcccgggatgagctgaccaagaaccaggtcagcctgacctgcctggtcaaaggcttctatcccagcgacatcgccgtggagtgggagagcaatgggcagccggagaacaactacaagaccacgcctcccgtgctggactccgacggctccttcttcctctacagcaagctcaccgtggacaagagcaggtggcagcaggggaacgtcttctcatgctccgtgatgcatgaggctctgcacaaccactacacgcagaagagcctctccctgtctccgggtaaagcggatccttcgaacctgctcccatcctgggccattaccttaatctcagtaaatggaatttttgtgatatgctgcctgacctactgctttgccccaagatgcagagagagaaggaggaatgagagattgagaagggaaagtgtacgccctgtataaatcgata

SEQ ID NO: 111 - protein, 543 aa, Artificial sequence
  Description of Artificial Sequence: Synthetic amino acid sequence
MDFQVQIFSFLLISASVIMSRGVDIVLTQSPTTIAASPGEKVTITCRASSSVSYMYWYQQKSGASPKLWIYDTSKLASGVPNRFSGSGSGTSYSLAINTMETEDAATYYCQQWSSTPLTFGSGTKLEIKRGGGGSGGGGSGGGGSQVQLKEAGPGLVQPTQTLSLTCTVSGFSLTSDGVHWIRQPPGKGLEWMGIIYYDGGTDYNSAIKSRLSISRDTSKSQVFLKINSLQTDDTAMYYCARIHFDYWGQGVMVTVSSDLEPKSCDKTHTCPPCPAPELLGGPSVFLFPPKPKDTLMISRTPEVTCVVVDVSHEDPEVKFNWYVDGVEVHNAKTKPREEQYNSTYRVVSVLTVLHQDWLNGKEYKCKVSNKALPAPIEKTISKAKGQPREPQVYTLPPSRDELTKNQVSLTCLVKGFYPSDIAVEWESNGQPENNYKTTPPVLDSDGSFFLYSKLTVDKSRWQQGNVFSCSVMHEALHNHYTQKSLSLSPGKADPSNLLPSWAITLISVNGIFVICCLTYCFAPRCRERRRNERLRRESVRPV

SEQ ID NO: 112 - DNA, 1527 bp, Artificial sequence
  Description of Artificial Sequence: Synthetic nucleotide sequence
aagcttatggattttcaagtgcagattttcagcttcctgctaatcagtgcttcagtcataatgtccagaggagtcgacatccagatgacacagactacatcctccctgtctgcctctctgggagacagagtcaccatcagttgcagggcaagtcaggacattcgcaattatttaaactggtatcagcagaaaccagatggaactgttaaactcctgatctactacacatcaagattacactcaggagtcccatcaaggttcagtggcagtgggtctggaacagattattctctcaccattgccaacctgcaaccagaagatattgccacttacttttgccaacagggtaatacgcttccgtggacgttcggtggaggcaccaaactggtaaccaaacgggagctcggtggcggtggctcgggcggtggtgggtcgggtggcggcggatctatcgatgaggtccagctgcaacagtctggacctgaactggtgaagcctggagcttcaatgtcctgcaaggcctctggttactcattcactggctacatcgtgaactggctgaagcagagccatggaaagaaccttgagtggattggacttattaatccatacaaaggtcttactacctacaaccagaaattcaagggcaaggccacattaactgtagacaagtcatccagcacagcctacatggagctcctcagtctgacatctgaagactctgcagtctattactgtgcaagatctgggtactatggtgactcggactggtacttcgatgtctggggcgcagggaccacggtcaccgtctcctctgatcaggagcccaaatcttgtgacaaaactcacacatgcccaccgtgcccagcacctgaactcctggggggaccgtcagtcttcctcttccccccaaaacccaaggacaccctcatgatctcccggacccctgaggtcacatgcgtggtggtggacgtgagccacgaagaccctgaggtcaagttcaactggtacgtggacggcgtggaggtgcataatgccaagacaaagccgcgggaggagcagtacaacagcacgtaccgtgtggtcagcgtcctcaccgtcctgcaccaggactggctgaatggcaaggagtacaagtgcaaggtctccaacaaagccctcccagcccccatcgagaaaacaatctccaaagccaaagggcagccccgagaaccacaggtgtacaccctgcccccatcccgggatgagctgaccaagaaccaggtcagcctgacctgcctggtcaaaggcttctatcccagcgacatcgccgtggagtgggagagcaatgggcagccggagaacaactacaagaccacgcctcccgtgctggactccgacggctccttcttcctctacagcaagctcaccgtggacaagagcaggtggcagcaggggaacgtcttctcatgctccgtgatgcatgaggctctgcacaaccactacacgcagaagagcctctccctgtctccgggtaaatgatctaga

SEQ ID NO: 113 - protein, 504 aa, Artificial sequence
  Description of Artificial Sequence: Synthetic amino acid sequence
MDFQVQIFSFLLISASVIMSRGVDIQMTQTTSSLSASLGDRVTISCRASQDIRNYLNWYQQKPDGTVKLLIYYTSRLHSGVPSRFSGSGSGTDYSLTIANLQPEDIATYFCQQGNTLPWTFGGGTKLVTKRELGGGGSGGGGSGGGGSIDEVQLQQSGPELVKPGASMSCKASGYSFTGYIVNWLKQSHGKNLEWIGLINPYKGLTTYNQKFKGKATLTVDKSSSTAYMELLSLTSEDSAVYYCARSGYYGDSDWYFDVWGAGTTVTVSSDQEPKSCDKTHTCPPCPAPELLGGPSVFLFPPKPKDTLMISRTPEVTCVVVDVSHEDPEVKFNWYVDGVEVHNAKTKPREEQYNSTYRVVSVLTVLHQDWLNGKEYKCKVSNKALPAPIEKTISKAKGQPREPQVYTLPPSRDELTKNQVSLTCLVKGFYPSDIAVEWESNGQPENNYKTTPPVLDSDGSFFLYSKLTVDKSRWQQGNVFSCSVMHEALHNHYTQKSLSLSPGK

SEQ ID NO: 114 - DNA, 2325 bp, Artificial sequence
  Description of Artificial Sequence: Synthetic nucleotide sequence
aagcttgccgccatggattttcaagtgcagattttcagcttcctgctaatcagtgcttcagtcataattgccagaggacaaattgttctctcccagtctccagcaatcctgtctgcatctccaggggagaaggtcacaatgacttgcagggccagctcaagtgtaagttacatgcactggtaccagcagaagccaggatcctcccccaaaccctggatttatgccccatccaacctggcttctggagtccctgctcgcttcagtggcagtgggtctgggacctcttactctctcacaatcagcagagtggaggctgaagatgctgccacttattactgccagcagtggagttttaacccacccacgttcggtgctgggaccaagctggagctgaaaggtggcggtggctcgggcggtggtggatctggaggaggtgggagctctcaggcttatctacagcagtctggggctgagctggtgaggcctggggcctcagtgaagatgtcctgcaaggcttctggctacacatttaccagttacaatatgcactgggtaaagcagacacctagacagggcctggaatggattggagctatttatccaggaaatggtgatacttcctacaatcagaagttcaagggcaaggccacactgactgtagacaaatcctccagcacagcctacatgcagctcagcagcctgacatctgaagactctgcggtctatttctgtgcaagagtggtgtactatagtaactcttactggtacttcgatgtctggggcacagggaccacggtcaccgtctcttctgatcaatccaactctgaagaagcaaagaaagaggaggccaaaaaggaggaagccaagaaatctaacagcgtcgacattgttctgactcagtctccagccaccctgtctgtgactccaggagatagagtctctctttcctgcagggccagccagagtattagcgactacttacactggtatcaacaaaaatcacatgagtctccaaggcttctcatcaaatatgcttcccattccatctctgggatcccctccaggttcagtggcagtggatcagggtcagatttcactctcagtatcaacagtgtggaacctgaagatgttggaatttattactgtcaacatggtcacagctttccgtggacgttcggtggaggcaccaagctggaaatcaaacggggtggcggtggctcgggcggaggtgggtcgggtggcggcggatctcagatccagttggtgcaatctggacctgagctgaagaagcctggagagacagtcaggatctcctgcaaggcttctgggtatgccttcacaactactggaatgcagtgggtgcaagagatgccaggaaagggtttgaagtggattggctggataaacaccccactctggagtgccaaaatatgtagaagacttcaaggacggtttgccttctctttggaaacctctgccaacactgcatatttacagataagcaacctcaaagatgaggacacggctacgtatttctgtgtgagatccgggaatggtaactatgacctggcctactttgcttactggggccaagggacactggtcactgtctctgatcaggagcccaaatcttctgacaaaactcacacatccccaccgtccccagcacctgaactcctggggggatcgtcagtcttcctcttccccccaaaacccaaggacaccctcatgatctcccggacccctgaggtcacatgcgtggtggtggacgtgagccacgaagaccctgaggtcaagttcaactggtacgtggacggcgtggaggtgcataatgccaagacaaagccgcgggaggagcagtacaacagcacgtaccgtgtggtcagcgtcctcaccgtcctgcaccaggactggctgaatggcaaggagtacaagtgcaaggtctccaacaaagccctcccagcccccatcgagaaaacaatctccaaagccaaagggcagccccgagaaccacaggtgtacaccctgcccccatcccgggatgagctgaccaagaaccaggtcagcctgacctgcctggtcaaaggcttctatcccagcgacatcgccgtggagtgggagagcaatgggcagccggagaacaactacaagaccacgcctcccgtgctggactccgacggctccttcttcctctacagcaagctcaccgtggacaagagcaggtggcagcaggggaacgtcttctcatgctccgtgatgcatgaggctctgcacaaccactacacgcagaagagcctctccctgtctccgggtaaatgatctaga

SEQ ID NO: 115 - protein, 768 aa, Artificial sequence
  Description of Artificial Sequence: Synthetic amino acid sequence
MDFQVQIFSFLLISASVIIARGQIVLSQSPAILSASPGEKVTMTCRASSSVSYMHWYQQKPGSSPKPWIYAPSNLASGVPARFSGSGSGTSYSLTISRVEAEDAATYYCQQWSFNPPTFGAGTKLELKGGGGSGGGGSGGGGSSQAYLQQSGAELVRPGASVKMSCKASGYTFTSYNMHWVKQTPRQGLEWIGAIYPGNGDTSYNQKFKGKATLTVDKSSSTAYMQLSSLTSEDSAVYFCARVVYYSNSYWYFDVWGTGTTVTVSSDQSNSEEAKKEEAKKEEAKKSNSVDIVLTQSPATLSVTPGDRVSLSCRASQSISDYLHWYQQKSHESPRLLIKYASHSISGIPSRFSGSGSGSDFTLSINSVEPEDVGIYYCQHGHSFPWTFGGGTKLEIKRGGGGSGGGGSGGGGSQIQLVQSGPELKKPGETVRISCKASGYAFTTTGMQWVQEMPGKGLKWIGWINTPLWSAKICRRLQGRFAFSLETSANTAYLQISNLKDEDTATYFCVRSGNGNYDLAYFAYWGQGTLVTVSDQEPKSSDKTHTSPPSPAPELLGGSSVFLFPPKPKDTLMISRTPEVTCVVVDVSHEDPEVKFNWYVDGVEVHNAKTKPREEQYNSTYRVVSVLTVLHQDWLNGKEYKCKVSNKALPAPIEKTISKAKGQPREPQVYTLPPSRDELTKNQVSLTCLVKGFYPSDIAVEWESNGQPENNYKTTPPVLDSDGSFFLYSKLTVDKSRWQQGNVFSCSVMHEALHNHYTQKSLSLSPGK

SEQ ID NO: 116 - DNA, 423 bp, Artificial sequence
  Description of Artificial Sequence: Synthetic nucleotide sequence
atggctgtcttggggctgctcttctgcctggtgacatttccaagctgtgtcctatcccaggtgcagctgaagcagtcaggacctggcctagtgcagtcctcacagagcctgtccatcacctgcacagtctctggtttctcattaactacctatgctgtacactgggttcgccagtctccaggaaagggtctggagtggctgggagtgatatggagtggtggaatcacagactataatgcagctttcatatccagactgagcatcaccaaggacgattccaagagccaagttttctttaaaatgaacagtctgcaacctaatgacacagccatttattactgtgccagaaatgggggtgataactacccttattactatgctatggactactggggtcaaggaacctcagtcaccgtctcctca

SEQ ID NO: 117 - DNA, 366 bp, Artificial sequence
  Description of Artificial Sequence: Synthetic nucleotide sequence
caggtgcagctgaagcagtcaggacctggcctagtgcagtcctcacagagcctgtccatcacctgcacagtctctggtttctcattaactacctatgctgtacactgggttcgccagtctccaggaaagggtctggagtggctgggagtgatatggagtggtggaatcacagactataatgcagctttcatatccagactgagcatcaccaaggacgattccaagagccaagttttctttaaaatgaacagtctgcaacctaatgacacagccatttattactgtgccagaaatgggggtgataactacccttattactatgctatggactactggggtcaaggaacctcagtcaccgtctcctca

SEQ ID NO: 118 - protein, 141 aa, Artificial sequence
  Description of Artificial Sequence: Synthetic amino acid sequence
MAVLGLLFCLVTFPSCVLSQVQLKQSGPGLVQSSQSLSITCTVSGFSLTTYAVHWVRQSPGKGLEWLGVIWSGGITDYNAAFISRLSITKDDSKSQVFFKMNSLQPNDTAIYYCARNGGDNYPYYYAMDYWGQGTSVTVSS

SEQ ID NO: 119 - protein, 122 aa, Artificial sequence
  Description of Artificial Sequence: Synthetic amino acid sequence
QVQLKQSGPGLVQSSQSLSITCTVSGFSLTTYAVHWVRQSPGKGLEWLGVIWSGGITDYNAAFISRLSITKDDSKSQVFFKMNSLQPNDTAIYYCARNGGDNYPYYYAMDYWGQGTSVTVSS

SEQ ID NO: 120 - DNA, 399 bp, Artificial sequence
  Description of Artificial Sequence: Synthetic nucleotide sequence
atgaggttctctgctcagcttctggggctgcttgtgctctggatccctggatccactgcagatattgtgatgacgcaggctgcattctccaatccagtcactcttggaacatcagcttccatctcctgcaggtctagtaagagtctcctacatagtaatggcatcacttatttgtattggtatctgcagaagccaggccagtctcctcagctcctgatttatcagatgtccaaccttgcctcaggagtcccagacaggttcagtagcagtgggtcaggaactgatttcacactgagaatcagcagagtggaggctgaggatgtgggtgtttattactgtgctcaaaatctagaacttccgctcacgttcggtgctgggaccaagctggagctgaaacgg

SEQ ID NO: 121 - protein, 133 aa, Artificial sequence
  Description of Artificial Sequence: Synthetic amino acid sequence
MRFSAQLLGLLVLWIPGSTADIVMTQAAFSNPVTLGTSASISCRSSKSLLHSNGITYLYWYLQKPGQSPQLLIYQMSNLASGVPDRFSSSGSGTDFTLRISRVEAEDVGVYYCAQNLELPLTFGAGTKLELKR

SEQ ID NO: 122 - DNA, 825 bp, Artificial sequence
  Description of Artificial Sequence: Synthetic nucleotide sequence
aagcttgccgccatgaggttctctgctcagcttctggggctgcttgtgctctggatccctggatccactgcagatattgtgatgacgcaggctgcattctccaatccagtcactcttggaacatcagcttccatctcctgcaggtctagtaagagtctcctacatagtaatggcatcacttatttgtattggtatctgcagaagccaggccagtctcctcagctcctgatttatcagatgtccaaccttgcctcaggagtcccagacaggttcagtagcagtgggtcaggaactgatttcacactgagaatcagcagagtggaggctgaggatgtgggtgtttattactgtgctcaaaatctagaacttccgctcacgttcggtgctgggaccaagctggagctgaaacggggtggcggtggctcgggcggtggtgggtcgggtggcggcggatcgtcacaggtgcagctgaagcagtcaggacctggcctagtgcagtcctcacagagcctgtccatcacctgcacagtctctggtttctcattaactacctatgctgtacactgggttcgccagtctccaggaaagggtctggagtggctgggagtgatatggagtggtggaatcacagactataatgcagctttcatatccagactgagcatcaccaaggacgattccaagagccaagttttctttaaaatgaacagtctgcaacctaatgacacagccatttattactgtgccagaaatgggggtgataactacccttattactatgctatggactactggggtcaaggaacctcagtcaccgtctcctct

SEQ ID NO: 123 - protein, 271 aa, Artificial sequence
  Description of Artificial Sequence: Synthetic amino acid sequence
MRFSAQLLGLLVLWIPGSTADIVMTQAAFSNPVTLGTSASISCRSSKSLLHSNGITYLYWYLQKPGQSPQLLIYQMSNLASGVPDRFSSSGSGTDFTLRISRVEAEDVGVYYCAQNLELPLTFGAGTKLELKRGGGGSGGGGSGGGGSSQVQLKQSGPGLVQSSQSLSITCTVSGFSLTTYAVHWVRQSPGKGLEWLGVIWSGGITDYNAAFISRLSITKDDSKSQVFFKMNSLQPNDTAIYYCARNGGDNYPYYYAMDYWGQGTSVTVSS

SEQ ID NO: 124 - DNA, 1696 bp, Artificial sequence
  Description of Artificial Sequence: Synthetic nucleotide sequence
aagcttgccgccatgaggttctctgctcagcttctggggctgcttgtgctctggatccctggatccactgcagatattgtgatgacgcaggctgcattctccaatccagtcactcttggaacatcagcttccatctcctgcaggtctagtaagagtctcctacatagtaatggcatcacttatttgtattggtatctgcagaagccaggccagtctcctcagctcctgatttatcagatgtccaaccttgcctcaggagtcccagacaggttcagtagcagtgggtcaggaactgatttcacactgagaatcagcagagtggaggctgaggatgtgggtgtttattactgtgctcaaaatctagaacttccgctcacgttcggtgctgggaccaagctggagctgaaacggggtggcggtggctcgggcggtggtgggtcgggtggcggcggatcgtcacaggtgcagctgaagcagtcaggacctggcctagtgcagtcctcacagagcctgtccatcacctgcacagtctctggtttctcattaactacctatgctgtacactgggttcgccagtctccaggaaagggtctggagtggctgggagtgatatggagtggtggaatcacagactataatgcagctttcatatccagactgagcatcaccaaggacgattccaagagccaagttttctttaaaatgaacagtctgcaacctaatgacacagccatttattactgtgccagaaatgggggtgataactacccttattactatgctatggactactggggtcaaggaacctcagtcaccgtctcctctgatctggagcccaaatcttctgacaaaactcacacaagcccaccgagcccagcacctgaactcctggggggatcgtcagtcttcctcttccccccaaaacccaaggacaccctcatgatctcccggacccctgaggtcacatgcgtggtggtggacgtgagccacgaagaccctgaggtcaagttcaactggtacgtggacggcgtggaggtgcataatgccaagacaaagccgcgggaggagcagtacaacagcacgtaccgtgtggtcagcgtcctcaccgtcctgcaccaggactggctgaatggcaaggagtacaagtgcaaggtctccaacaaagccctcccagcccccatcgagaaaaccatctccaaagccaaagggcagccccgagaaccacaggtgtacaccctgcccccatcccgggatgagctgaccaagaaccaggtcagcctgacctgcctggtcaaaggcttctatcccagcgacatcgccgtggagtgggagagcaatgggcagccggagaacaactacaagaccacgcctcccgtgctggactccgacggctccttcttcctctacagcaagctcaccgtggacaagagcaggtggcagcaggggaacgtcttctcatgctccgtgatgcatgaggctctgcacaaccactacacgcagaagagcctctccctgtctccgggtaaagcggatccttcgaacctgctcccatcctgggccattaccttaatctcagtaaatggaatttttgtgatatgctgcctgacctactgctttgccccaagatgcagagagagaaggaggaatgagagattgagaagggaaagtgtacgccctgtataaatcgatactcgag

SEQ ID NO: 125 - protein, 556 aa, Artificial sequence
  Description of Artificial Sequence: Synthetic amino acid sequence
MRFSAQLLGLLVLWIPGSTADIVMTQAAFSNPVTLGTSASISCRSSKSLLHSNGITYLYWYLQKPGQSPQLLIYQMSNLASGVPDRFSSSGSGTDFTLRISRVEAEDVGVYYCAQNLELPLTFGAGTKLELKRGGGGSGGGGSGGGGSSQVQLKQSGPGLVQSSQSLSITCTVSGFSLTTYAVHWVRQSPGKGLEWLGVIWSGGITDYNAAFISRLSITKDDSKSQVFFKMNSLQPNDTAIYYCARNGGDNYPYYYAMDYWGQGTSVTVSSDLEPKSSDKTHTSPPSPAPELLGGSSVFLFPPKPKDTLMISRTPEVTCVVVDVSHEDPEVKFNWYVDGVEVHNAKTKPREEQYNSTYRVVSVLTVLHQDWLNGKEYKCKVSNKALPAPIEKTISKAKGQPREPQVYTLPPSRDELTKNQVSLTCLVKGFYPSDIAVEWESNGQPENNYKTTPPVLDSDGSFFLYSKLTVDKSRWQQGNVFSCSVMHEALHNHYTQKSLSLSPGKADPSNLLPSWAITLISVNGIFVICCLTYCFAPRCRERRRNERLRRESVRPV

SEQ ID NO: 126 - DNA, 1683 bp, Artificial sequence
  Description of Artificial Sequence: Synthetic nucleotide sequence
aagcttatggattttcaagtgcagattttcagcttcctgctaatcagtgcttcagtcataatgtccagaggagtcgacattgtgctcacccaatctccagcttctttggctgtgtctctaggtcagagagccaccatctcctgcagagccagtgaaagtgttgaatattatgtcacaagtttaatgcagtggtaccaacagaaaccaggacagccacccaaactcctcatctctgctgcatccaacgtagaatctggggtccctgccaggtttagtggcagtgggtctgggacagacttcagcctcaacatccatcctgtggaggaggatgatattgcaatgtatttctgtcagcaaagtaggaaggttccttggacgttcggtggaggcaccaagctggaaatcaaacggggtggcggtggctcgggcggaggtgggtcgggtggcggcggatctcaggtgcagctgaaggagtcaggacctggcctggtggcgccctcacagagcctgtccatcacatgcaccgtctcagggttctcattaaccggctatggtgtaaactgggttcgccagcctccaggaaagggtctggagtggctgggaatgatatggggtgatggaagcacagactataattcagctctcaaatccagactgagcatcaccaaggacaactccaagagccaagttttcttaaaaatgaacagtctgcaaactgatgacacagccagatactactgtgccagagatggttatagtaactttcattactatgttatggactactggggtcaaggaacctcagtcaccgtctcctcagatctggagcccaaatcttgtgacaaaactcacacatgcccaccgtgcccagcacctgaactcctggggggaccgtcagtcttcctcttccccccaaaacccaaggacaccctcatgatctcccggacccctgaggtcacatgcgtggtggtggacgtgagccacgaagaccctgaggtcaagttcaactggtacgtggacggcgtggaggtgcataatgccaagacaaagccgcgggaggagcagtacaacagcacgtaccgtgtggtcagcgtcctcaccgtcctgcaccaggactggctgaatggcaaggagtacaagtgcaaggtctccaacaaagccctcccagcccccatcgagaaaaccatctccaaagccaaagggcagccccgagaaccacaggtgtacaccctgcccccatcccgggatgagctgaccaagaaccaggtcagcctgacctgcctggtcaaaggcttctatcccagcgacatcgccgtggagtgggagagcaatgggcagccggagaacaactacaagaccacgcctcccgtgctggactccgacggctccttcttcctctacagcaagctcaccgtggacaagagcaggtggcagcaggggaacgtcttctcatgctccgtgatgcatgaggctctgcacaaccactacacgcagaagagcctctccctgtctccgggtaaagcggatccttcgaacctgctcccatcctgggccattaccttaatctcagtaaatggaatttttgtgatatgctgcctgacctactgctttgccccaagatgcagagagagaaggaggaatgagagattgagaagggaaagtgtacgccctgtataaatcgat

SEQ ID NO: 127 - protein, 556 aa, Artificial sequence
  Description of Artificial Sequence: Synthetic amino acid sequence
MDFQVQIFSFLLISASVIMSRGVDIVLTQSPASLAVSLGQRATISCRASESVEYYVTSLMQWYQQKPGQPPKLLISAASNVESGVPARFSGSGSGTDFSLNIHPVEEDDIAMYFCQQSRKVPWTFGGGTKLEIKRGGGGSGGGGSGGGGSQVQLKESGPGLVAPSQSLSITCTVSGFSLTGYGVNWVRQPPGKGLEWLGMIWGDGSTDYNSALKSRLSITKDNSKSQVFLKMNSLQTDDTARYYCARDGYSNFHYYVMDYWGQGTSVTVSSDLEPKSCDKTHTCPPCPAPELLGGPSVFLFPPKPKDTLMISRTPEVTCVVVDVSHEDPEVKFNWYVDGVEVHNAKTKPREEQYNSTYRVVSVLTVLHQDWLNGKEYKCKVSNKALPAPIEKTISKAKGQPREPQVYTLPPSRDELTKNQVSLTCLVKGFYPSDIAVEWESNGQPENNYKTTPPVLDSDGSFFLYSKLTVDKSRWQQGNVFSCSVMHEALHNHYTQKSLSLSPGKADPSNLLPSWAITLISVNGIFVICCLTYCFAPRCRERRRNERLRRESVRPV

SEQ ID NO: 128 - DNA, 1800 bp, Artificial Sequence
  Description of Artificial Sequence: Synthetic nucleotide sequence
aagcttgccgccatggattttcaagtgcagattttcagcttcctgctaatcagtgcttcagtcataattgccagaggacaaattgttctctcccagtctccagcaatcctgtctgcatctccaggggagaaggtcacaatgacttgcagggccagctcaagtgtaagttacatgcactggtaccagcagaagccaggatcctcccccaaaccctggatttatgccccatccaacctggcttctggagtccctgctcgcttcagtggcagtgggtctgggacctcttactctctcacaatcagcagagtggaggctgaagatgctgccacttattactgccagcagtggagttttaacccacccacgttcggtgctgggaccaagctggagctgaaaggtggcggtggctcgggcggtggtggatctggaggaggtgggagctctcaggcttatctacagcagtctggggctgagctggtgaggcctggggcctcagtgaagatgtcctgcaaggcttctggctacacatttaccagttacaatatgcactgggtaaagcagacacctagacagggcctggaatggattggagctatttatccaggaaatggtgatacttcctacaatcagaagttcaagggcaaggccacactgactgtagacaaatcctccagcacagcctacatgcagctcagcagcctgacatctgaagactctgcggtctatttctgtgcaagagtggtgtactatagtaactcttactggtacttcgatgtctggggcacagggaccacggtcaccgtctctgatcacgtctgctccagggacttcaccccgcccaccgtgaagatcttacagtcgtcctgcgacggcggcgggcacttccccccgaccatccagctcctgtgcctcgtctctgggtacaccccagggactatcaacatcacctggctggaggacgggcaggtcatggacgtggacttgtccaccgcctctaccacgcaggagggtgagctggcctccacacaaagcgagctcaccctcagccagaagcactggctgtcagaccgcacctacacctgccaggtcacctatcaaggtcacacctttgaggacagcaccaagaagtgtgcagattccaacccgagaggggtgagcgcctacctaagccggcccagcccgttcgacctgttcatccgcaagtcgcccacgatcacctgtctggtggtggacctggcacccagcaaggggaccgtgaacctgacctggtcccgggccagtgggaagcctgtgaaccactccaccagaaaggaggagaagcagcgcaatggcacgttaaccgtcacgtccaccctgccggtgggcacccgagactggatcgagggggagacctaccagtgcagggtgacccacccccacctgcccagggccctcatgcggtccacgaccaagaccagcggcccgcgtgctgccccggaagtctatgcgtttgcgacgccggagtggccggggagccgggacaagcgcaccctcgcctgcctgatccagaacttcatgcctgaggacatctcggtgcagtggctgcacaacgaggtgcagctcccggacgcccggcacagcacgacgcagccccgcaagaccaagggctccggcttcttcgtcttcagccgcctggaggtgaccagggccgaatgggagcagaaagatgagttcatctgccgtgcagtccatgaggcagcgagcccctcacagaccgtccagcgagcggtgtctgtaaatcccggtaaatgataatctaga

SEQ ID NO: 129 - protein, 592 aa, Artificial sequence
  Description of Artificial Sequence: Synthetic amino acid sequence
MDFQVQIFSFLLISASVIIARGQIVLSQSPAILSASPGEKVTMTCRASSSVSYMHWYQQKPGSSPKPWIYAPSNLASGVPARFSGSGSGTSYSLTISRVEAEDAATYYCQQWSFNPPTFGAGTKLELKGGGGSGGGGSGGGGSSQAYLQQSGAELVRPGASVKMSCKASGYTFTSYNMHWVKQTPRQGLEWIGAIYPGNGDTSYNQKFKGKATLTVDKSSSTAYMQLSSLTSEDSAVYFCARVVYYSNSYWYFDVWGTGTTVTVSDHVCSRDFTPPTVKILQSSCDGGGHFPPTIQLLCLVSGYTPGTINITWLEDGQVMDVDLSTASTTQEGELASTQSELTLSQKHWLSDRTYTCQVTYQGHTFEDSTKKCADSNPRGVSAYLSRPSPFDLFIRKSPTITCLVVDLAPSKGTVNLTWSRASGKPVNHSTRKEEKQRNGTLTVTSTLPVGTRDWIEGETYQCRVTHPHLPRALMRSTTKTSGPRAAPEVYAFATPEWPGSRDKRTLACLIQNFMPEDISVQWLHNEVQLPDARHSTTQPRKTKGSGFFVFSRLEVTRAEWEQKDEFICRAVHEAASPSQTVQRAVSVNPGK

SEQ ID NO: 130 - DNA, 1521 bp, Artificial sequence
  Description of Artificial Sequence: Synthetic nucleotide sequence
aagcttgccgccatggattttcaagtgcagattttcagcttcctgctaatcagtgcttcagtcataattgccagaggacaaattgttctctcccagtctccagcaatcctgtctgcatctccaggggagaaggtcacaatgacttgcagggccagctcaagtgtaagttacatgcactggtaccagcagaagccaggatcctcccccaaaccctggatttatgccccatccaacctggcttctggagtccctgctcgcttcagtggcagtgggtctgggacctcttactctctcacaatcagcagagtggaggctgaagatgctgccacttattactgccagcagtggagttttaacccacccacgttcggtgctgggaccaagctggagctgaaagatggcggtggctcgggcggtggtggatctggaggaggtgggagctctcaggcttatctacagcagtctggggctgagctggtgaggcctggggcctcagtgaagatgtcctgcaaggcttctggctacacatttaccagttacaatatgcactgggtaaagcagacacctagacagggcctggaatggattggagctatttatccaggaaatggtgatacttcctacaatcagaagttcaagggcaaggccacactgactgtagacaaatcctccagcacagcctacatgcagctcagcagcctgacatctgaagactctgcggtctatttctgtgcaagagtggtgtactatagtaactcttactggtacttcgatgtctggggcacagggaccacggtcaccgtctcttctgatcaggagcccaaatcttctgacaaaactcacacatccccaccgtccccagcacctgaactcctggggggatcgtcagtcttcctcttccccccaaaacccaaggacaccctcatgatctcccggacccctgaggtcacatgcgtggtggtggacgtgagccacgaagaccctgaggtcaagttcaactggtacgtggacggcgtggaggtgcataatgccaagacaaagccgcgggaggagcagtacaacagcacgtaccgtgtggtcagcgtcctcaccgtcctgcaccaggactggctgaatggcaaggagtacaagtgcaaggtctccaacaaagccctcccagcccccatcgagaaaacaatctccaaagccaaagggcagccccgagaaccacaggtgtacaccctgcccccatcccgggatgagctgaccaagaaccaggtcagcctgacctgcctggtcaaaggcttctatcccagcgacatcgccgtggagtgggagagcaatgggcagccggagaacaactacaagaccacgcctcccgtgctggactccgacggctccttcttcctctacagcaagctcaccgtggacaagagcaggtggcagcaggggaacgtcttctcatgctccgtgatgcatgaggctctgcacaaccactacacgcagaagagcctctccctgtctccgggtaaatgatctaga

SEQ ID NO: 131 - protein, 500 aa, Artificial sequence
  Description of Artificial Sequence: Synthetic amino acid sequence
MDFQVQIFSFLLISASVIIARGQIVLSQSPAILSASPGEKVTMTCRASSSVSYMHWYQQKPGSSPKPWIYAPSNLASGVPARFSGSGSGTSYSLTISRVEAEDAATYYCQQWSFNPPTFGAGTKLELKDGGGSGGGGSGGGGSSQAYLQQSGAELVRPGASVKMSCKASGYTFTSYNMHWVKQTPRQGLEWIGAIYPGNGDTSYNQKFKGKATLTVDKSSSTAYMQLSSLTSEDSAVYFCARVVYYSNSYWYFDVWGTGTTVTVSSDQEPKSSDKTHTSPPSPAPELLGGSSVFLFPPKPKDTLMISRTPEVTCVVVDVSHEDPEVKFNWYVDGVEVHNAKTKPREEQYNSTYRVVSVLTVLHQDWLNGKEYKCKVSNKALPAPIEKTISKAKGQPREPQVYTLPPSRDELTKNQVSLTCLVKGFYPSDIAVEWESNGQPENNYKTTPPVLDSDGSFFLYSKLTVDKSRWQQGNVFSCSVMHEALHNHYTQKSLSLSPGK

SEQ ID NO: 132 - DNA, 1536 bp, Artificial sequence
  Description of Artificial Sequence: Synthetic nucleotide sequence
aagcttgccgccatgaggttctctgctcagcttctggggctgcttgtgctctggatccctggatccactgcagatattgtgatgacgcaggctgcattctccaatccagtcactcttggaacatcagcttccatctcctgcaggtctagtaagagtctcctacatagtaatggcatcacttatttgtattggtatctgcagaagccaggccagtctcctcagctcctgatttatcagatgtccaaccttgcctcaggagtcccagacaggttcagtagcagtgggtcaggaactgatttcacactgagaatcagcagagtggaggctgaggatgtgggtgtttattactgtgctcaaaatctagaacttccgctcacgttcggtgctgggaccaagctggagctgaaacggggtggcggtggctcgggcggtggtgggtcgggtggcggcggatcgtcacaggtgcagctgaagcagtcaggacctggcctagtgcagtcctcacagagcctgtccatcacctgcacagtctctggtttctcattaactacctatgctgtacactgggttcgccagtctccaggaaagggtctggagtggctgggagtgatatggagtggtggaatcacagactataatgcagctttcatatccagactgagcatcaccaaggacgattccaagagccaagttttctttaaaatgaacagtctgcaacctaatgacacagccatttattactgtgccagaaatgggggtgataactacccttattactatgctatggactactggggtcaaggaacctcagtcaccgtctcctctgatcaggagcccaaatcttctgacaaaactcacacatccccaccgtccccagcacctgaactcctggggggaccgtcagtcttcctcttccccccaaaacccaaggacaccctcatgatctcccggacccctgaggtcacatgcgtggtggtggacgtgagccacgaagaccctgaggtcaagttcaactggtacgtggacggcgtggaggtgcataatgccaagacaaagccgcgggaggagcagtacaacagcacgtaccgtgtggtcagcgtcctcaccgtcctgcaccaggactggctgaatggcaaggagtacaagtgcaaggtctccaacaaagccctcccagcccccatcgagaaaacaatctccaaagccaaagggcagccccgagaaccacaggtgtacaccctgcccccatcccgggatgagctgaccaagaaccaggtcagcctgacctgcctggtcaaaggcttctatcccagcgacatcgccgtggagtgggagagcaatgggcagccggagaacaactacaagaccacgcctcccgtgctggactccgacggctccttcttcctctacagcaagctcaccgtggacaagagcaggtggcagcaggggaacgtcttctcatgctccgtgatgcatgaggctctgcacaaccactacacgcagaagagcctctccctgtctccgggtaaatgatctaga

SEQ ID NO: 133 - protein, 505 aa, Artificial sequence
  Description of Artificial Sequence: Synthetic amino acid sequence
MRFSAQLLGLLVLWIPGSTADIVMTQAAFSNPVTLGTSASISCRSSKSLLHSNGITYLYWYLQKPGQSPQLLIYQMSNLASGVPDRFSSSGSGTDFTLRISRVEAEDVGVYYCAQNLELPLTFGAGTKLELKRGGGGSGGGGSGGGGSSQVQLKQSGPGLVQSSQSLSITCTVSGFSLTTYAVHWVRQSPGKGLEWLGVIWSGGITDYNAAFISRLSITKDDSKSQVFFKMNSLQPNDTAIYYCARNGGDNYPYYYAMDYWGQGTSVTVSSDQEPKSSDKTHTSPPSPAPELLGGPSVFLFPPKPKDTLMISRTPEVTCVVVDVSHEDPEVKFNWYVDGVEVHNAKTKPREEQYNSTYRVVSVLTVLHQDWLNGKEYKCKVSNKALPAPIEKTISKAKGQPREPQVYTLPPSRDELTKNQVSLTCLVKGFYPSDIAVEWESNGQPENNYKTTPPVLDSDGSFFLYSKLTVDKSRWQQGNVFSCSVMHEALHNHYTQKSLSLSPGK

SEQ ID NO: 134 - DNA, 1521 bp, Artificial Sequence
  Description of Artificial Sequence: Synthetic nucleotide sequence
aagcttgccgccatggattttcaagtgcagattttcagcttcctgctaatcagtgcttcagtcataattgccagaggacaaattgttctctcccagtctccagcaatcctgtctgcatctccaggggagaaggtcacaatgacttgcagggccagctcaagtgtaagttacatgcactggtaccagcagaagccaggatcctcccccaaaccctggatttatgccccatccaacctggcttctggagtccctgctcgcttcagtggcagtgggtctgggacctcttactctctcacaatcagcagagtggaggctgaagatgctgccacttattactgccagcagtggagttttaacccacccacgttcggtgctgggaccaagctggagctgaaagatggcggtggctcgggcggtggtggatctggaggaggtgggagctctcaggcttatctacagcagtctggggctgagctggtgaggcctggggcctcagtgaagatgtcctgcaaggcttctggctacacatttaccagttacaatatgcactgggtaaagcagacacctagacagggcctggaatggattggagctatttatccaggaaatggtgatacttcctacaatcagaagttcaagggcaaggccacactgactgtagacaaatcctccagcacagcctacatgcagctcagcagcctgacatctgaagactctgcggtctatttctgtgcaagagtggtgtactatagtaactcttactggtacttcgatgtctggggcacagggaccacggtcaccgtctcttctgatcaggagcccaaatcttgtgacaaaactcacacatccccaccgtccccagcacctgaactcctggggggaccgtcagtcttcctcttccccccaaaacccaaggacaccctcatgatctcccggacccctgaggtcacatgcgtggtggtggacgtgagccacgaagaccctgaggtcaagttcaactggtacgtggacggcgtggaggtgcataatgccaagacaaagccgcgggaggagcagtacaacagcacgtaccgtgtggtcagcgtcctcaccgtcctgcaccaggactggctgaatggcaaggagtacaagtgcaaggtctccaacaaagccctcccagcccccatcgagaaaacaatctccaaagccaaagggcagccccgagaaccacaggtgtacaccctgcccccatcccgggatgagctgaccaagaaccaggtcagcctgacctgcctggtcaaaggcttctatcccagcgacatcgccgtggagtgggagagcaatgggcagccggagaacaactacaagaccacgcctcccgtgctggactccgacggctccttcttcctctacagcaagctcaccgtggacaagagcaggtggcagcaggggaacgtcttctcatgctccgtgatgcatgaggctctgcacaaccactacacgcagaagagcctctccctgtctccgggtaaatgatctaga

SEQ ID NO: 135 - protein, 500 aa, Artificial Sequence
  Description of Artificial Sequence: Synthetic amino acid sequence
MDFQVQIFSFLLISASVIIARGQIVLSQSPAILSASPGEKVTMTCRASSSVSYMHWYQQKPGSSPKPWIYAPSNLASGVPARFSGSGSGTSYSLTISRVEAEDAATYYCQQWSFNPPTFGAGTKLELKDGGGSGGGGSGGGGSSQAYLQQSGAELVRPGASVKMSCKASGYTFTSYNMHWVKQTPRQGLEWIGAIYPGNGDTSYNQKFKGKATLTVDKSSSTAYMQLSSLTSEDSAVYFCARVVYYSNSYWYFDVWGTGTTVTVSSDQEPKSCDKTHTSPPSPAPELLGGPSVFLFPPKPKDTLMISRTPEVTCVVVDVSHEDPEVKFNWYVDGVEVHNAKTKPREEQYNSTYRVVSVLTVLHQDWLNGKEYKCKVSNKALPAPIEKTISKAKGQPREPQVYTLPPSRDELTKNQVSLTCLVKGFYPSDIAVEWESNGQPENNYKTTPPVLDSDGSFFLYSKLTVDKSRWQQGNVFSCSVMHEALHNHYTQKSLSLSPGK

SEQ ID NO: 136 - DNA, 1521 bp, Artificial Sequence
  Description of Artificial Sequence: Synthetic nucleotide sequence
aagcttgccgccatggattttcaagtgcagattttcagcttcctgctaatcagtgcttcagtcataattgccagaggacaaattgttctctcccagtctccagcaatcctgtctgcatctccaggggagaaggtcacaatgacttgcagggccagctcaagtgtaagttacatgcactggtaccagcagaagccaggatcctcccccaaaccctggatttatgccccatccaacctggcttctggagtccctgctcgcttcagtggcagtgggtctgggacctcttactctctcacaatcagcagagtggaggctgaagatgctgccacttattactgccagcagtggagttttaacccacccacgttcggtgctgggaccaagctggagctgaaagatggcggtggctcgggcggtggtggatctggaggaggtgggagctctcaggcttatctacagcagtctggggctgagctggtgaggcctggggcctcagtgaagatgtcctgcaaggcttctggctacacatttaccagttacaatatgcactgggtaaagcagacacctagacagggcctggaatggattggagctatttatccaggaaatggtgatacttcctacaatcagaagttcaagggcaaggccacactgactgtagacaaatcctccagcacagcctacatgcagctcagcagcctgacatctgaagactctgcggtctatttctgtgcaagagtggtgtactatagtaactcttactggtacttcgatgtctggggcacagggaccacggtcaccgtctcttctgatcaggagcccaaatcttctgacaaaactcacacatgcccaccgtccccagcacctgaactcctggggggaccgtcagtcttcctcttccccccaaaacccaaggacaccctcatgatctcccggacccctgaggtcacatgcgtggtggtggacgtgagccacgaagaccctgaggtcaagttcaactggtacgtggacggcgtggaggtgcataatgccaagacaaagccgcgggaggagcagtacaacagcacgtaccgtgtggtcagcgtcctcaccgtcctgcaccaggactggctgaatggcaaggagtacaagtgcaaggtctccaacaaagccctcccagcccccatcgagaaaacaatctccaaagccaaagggcagccccgagaaccacaggtgtacaccctgcccccatcccgggatgagctgaccaagaaccaggtcagcctgacctgcctggtcaaaggcttctatcccagcgacatcgccgtggagtgggagagcaatgggcagccggagaacaactacaagaccacgcctcccgtgctggactccgacggctccttcttcctctacagcaagctcaccgtggacaagagcaggtggcagcaggggaacgtcttctcatgctccgtgatgcatgaggctctgcacaaccactacacgcagaagagcctctccctgtctccgggtaaatgatctaga

SEQ ID NO: 137 - protein, 500 aa, Artificial Sequence
  Description of Artificial Sequence: Synthetic amino acid sequence
MDFQVQIFSFLLISASVIIARGQIVLSQSPAILSASPGEKVTMTCRASSSVSYMHWYQQKPGSSPKPWIYAPSNLASGVPARFSGSGSGTSYSLTISRVEAEDAATYYCQQWSFNPPTFGAGTKLELKDGGGSGGGGSGGGGSSQAYLQQSGAELVRPGASVKMSCKASGYTFTSYNMHWVKQTPRQGLEWIGAIYPGNGDTSYNQKFKGKATLTVDKSSSTAYMQLSSLTSEDSAVYFCARVVYYSNSYWYFDVWGTGTTVTVSSDQEPKSSDKTHTCPPSPAPELLGGPSVFLFPPKPKDTLMISRTPEVTCVVVDVSHEDPEVKFNWYVDGVEVHNAKTKPREEQYNSTYRVVSVLTVLHQDWLNGKEYKCKVSNKALPAPIEKTISKAKGQPREPQVYTLPPSRDELTKNQVSLTCLVKGFYPSDIAVEWESNGQPENNYKTTPPVLDSDGSFFLYSKLTVDKSRWQQGNVFSCSVMHEALHNHYTQKSLSLSPGK

SEQ ID NO: 138 - DNA, 1521 bp, Artificial Sequence
  Description of Artificial Sequence: Synthetic nucleotide sequence
aagcttgccgccatggattttcaagtgcagattttcagcttcctgctaatcagtgcttcagtcataattgccagaggacaaattgttctctcccagtctccagcaatcctgtctgcatctccaggggagaaggtcacaatgacttgcagggccagctcaagtgtaagttacatgcactggtaccagcagaagccaggatcctcccccaaaccctggatttatgccccatccaacctggcttctggagtccctgctcgcttcagtggcagtgggtctgggacctcttactctctcacaatcagcagagtggaggctgaagatgctgccacttattactgccagcagtggagttttaacccacccacgttcggtgctgggaccaagctggagctgaaagatggcggtggctcgggcggtggtggatctggaggaggtgggagctctcaggcttatctacagcagtctggggctgagctggtgaggcctggggcctcagtgaagatgtcctgcaaggcttctggctacacatttaccagttacaatatgcactgggtaaagcagacacctagacagggcctggaatggattggagctatttatccaggaaatggtgatacttcctacaatcagaagttcaagggcaaggccacactgactgtagacaaatcctccagcacagcctacatgcagctcagcagcctgacatctgaagactctgcggtctatttctgtgcaagagtggtgtactatagtaactcttactggtacttcgatgtctggggcacagggaccacggtcaccgtctcttctgatcaggagcccaaatcttctgacaaaactcacacatccccaccgtgcccagcacctgaactcctggggggaccgtcagtcttcctcttccccccaaaacccaaggacaccctcatgatctcccggacccctgaggtcacatgcgtggtggtggacgtgagccacgaagaccctgaggtcaagttcaactggtacgtggacggcgtggaggtgcataatgccaagacaaagccgcgggaggagcagtacaacagcacgtaccgtgtggtcagcgtcctcaccgtcctgcaccaggactggctgaatggcaaggagtacaagtgcaaggtctccaacaaagccctcccagcccccatcgagaaaacaatctccaaagccaaagggcagccccgagaaccacaggtgtacaccctgcccccatcccgggatgagctgaccaagaaccaggtcagcctgacctgcctggtcaaaggcttctatcccagcgacatcgccgtggagtgggagagcaatgggcagccggagaacaactacaagaccacgcctcccgtgctggactccgacggctccttcttcctctacagcaagctcaccgtggacaagagcaggtggcagcaggggaacgtcttctcatgctccgtgatgcatgaggctctgcacaaccactacacgcagaagagcctctccctgtctccgggtaaatgatctaga

SEQ ID NO: 139 - protein, 500 aa, Artificial Sequence
  Description of Artificial Sequence: Synthetic amino acid sequence
MDFQVQIFSFLLISASVIIARGQIVLSQSPAILSASPGEKVTMTCRASSSVSYMHWYQQKPGSSPKPWIYAPSNLASGVPARFSGSGSGTSYSLTISRVEAEDAATYYCQQWSFNPPTFGAGTKLELKDGGGSGGGGSGGGGSSQAYLQQSGAELVRPGASVKMSCKASGYTFTSYNMHWVKQTPRQGLEWIGAIYPGNGDTSYNQKFKGKATLTVDKSSSTAYMQLSSLTSEDSAVYFCARVVYYSNSYWYFDVWGTGTTVTVSSDQEPKSSDKTHTSPPCPAPELLGGPSVFLFPPKPKDTLMISRTPEVTCVVVDVSHEDPEVKFNWYVDGVEVHNAKTKPREEQYNSTYRVVSVLTVLHQDWLNGKEYKCKVSNKALPAPIEKTISKAKGQPREPQVYTLPPSRDELTKNQVSLTCLVKGFYPSDIAVEWESNGQPENNYKTTPPVLDSDGSFFLYSKLTVDKSRWQQGNVFSCSVMHEALHNHYTQKSLSLSPGK

SEQ ID NO: 140 - DNA, 44 bp, Artificial sequence
  Description of Artificial Sequence: Synthetic primer
gttgttgatcaggagcccaaatcttctgacaaaactcacacatg

SEQ ID NO: 141 - DNA, 54 bp, Artificial sequence
  Description of Artificial Sequence: Synthetic primer
gttgttgatcaggagcccaaatcttgtgacaaaactcacacatctccaccgtgc

SEQ ID NO: 142 - DNA, 63 bp, Artificial sequence
  Description of Artificial Sequence: Synthetic primer
gttgttgatcaggagcccaaatcttgtgacaaaactcacacatgtccaccgtccccagcacct

SEQ ID NO: 143 - DNA, 324 bp, Artificial Sequence
  Description of Artificial Sequence: Synthetic nucleotide sequence
gggcagccccgagaaccacaggtgtacaccctgcccccatcccgggaggagatgaccaagaaccaggtcagcctgacctgcctggtcaaaggcttctatcccagcgacatcgccgtggagtgggagagcaatgggcagccggagaacaactacaagaccacgcctcccgtgctggactccgacggctccttctacctctatagcaagctcaccgtggacaagagcaggtggcagcaggggaacgtcttctcatgctccgtgatgcatgaggctctgcacaaccactacacgcagaagagcctctccctgtccccgggtaaatga

SEQ ID NO: 144 - protein, 107 aa, Artificial Sequence
  Description of Artificial Sequence: Synthetic amino acid sequence
GQPREPQVYTLPPSREEMTKNQVSLTCLVKGFYPSDIAVEWESNGQPENNYKTTPPVLDSDGSFYLYSKLTVDKSRWQQGNVFSCSVMHEALHNHYTQKSLSLSPGK

SEQ ID NO: 145 - DNA, 324 bp, Artificial Sequence
  Description of Artificial Sequence: Synthetic nucleotide sequence
gggcagccccgagaaccacaggtgtacaccctgcccccatcccgggaggagatgaccaagaaccaggtcagcctgacctgcctggtcaaaggcttctatcccagcgacatcgccgtggagtgggagagcaatgggcagccggagaacaactacaagaccacgcctcccgtgctggactccgacggctccttcgccctctatagcaagctcaccgtggacaagagcaggtggcagcaggggaacgtcttctcatgctccgtgatgcatgaggctctgcacaaccactacacgcagaagagcctctccctgtccccgggtaaatga

SEQ ID NO: 146 - protein, 107 aa, Artificial Sequence
  Description of Artificial Sequence: Synthetic amino acid sequence
GQPREPQVYTLPPSREEMTKNQVSLTCLVKGFYPSDIAVEWESNGQPENNYKTTPPVLDSDGSFALYSKLTVDKSRWQQGNVFSCSVMHEALHNHYTQKSLSLSPGK

SEQ ID NO: 147 - DNA, 324 bp, Artificial Sequence
  Description of Artificial Sequence: Synthetic nucleotide sequence
gggcagccccgagaaccacaggtgtacaccctgcccccatcccgggaggagatgaccaagaaccaggtcagcctgacctgcctggtcaaaggcttctatcccagcgacatcgccgtggagtgggagagcaatgggcagccggagaacaactacaagaccacgcctcccgtgctggactccgacggctccttcttcctcgccagcaagctcaccgtggacaagagcaggtggcagcaggggaacgtcttctcatgctccgtgatgcatgaggctctgcacaaccactacacgcagaagagcctctccctgtccccgggtaaatga

SEQ ID NO: 148 - protein, 107 aa, Artificial Sequence
  Description of Artificial Sequence: Synthetic amino acid sequence
GQPREPQVYTLPPSREEMTKNQVSLTCLVKGFYPSDIAVEWESNGQPENNYKTTPPVLDSDGSFFLASKLTVDKSRWQQGNVFSCSVMHEALHNHYTQKSLSLSPGK

SEQ ID NO: 149 - DNA, 324 bp, Artificial Sequence
  Description of Artificial Sequence: Synthetic nucleotide sequence
gggcagccccgagaaccacaggtgtacaccctgcccccatcccgggaggagatgaccaagaaccaggtcagcctgacctgcctggtcaaaggcttctatcccagcgacatcgccgtggagtgggagagcaatgggcagccggagaacaactacaagaccacgcctcccgtgctggactccgacggctccttctacctcgccagcaagctcaccgtggacaagagcaggtggcagcaggggaacgtcttctcatgctccgtgatgcatgaggctctgcacaaccactacacgcagaagagcctctccctgtccccgggtaaatga

SEQ ID NO: 150 - protein, 107 aa, Artificial Sequence
  Description of Artificial Sequence: Synthetic amino acid sequence
GQPREPQVYTLPPSREEMTKNQVSLTCLVKGFYPSDIAVEWESNGQPENNYKTTPPVLDSDGSFYLASKLTVDKSRWQQGNVFSCSVMHEALHNHYTQKSLSLSPGK

SEQ ID NO: 151 - DNA, 324 bp, Artificial Sequence
  Description of Artificial Sequence: Synthetic nucleotide sequence
gggcagccccgagaaccacaggtgtacaccctgcccccatcccgggaggagatgaccaagaaccaggtcagcctgacctgcctggtcaaaggcttctatcccagcgacatcgccgtggagtgggagagcaatgggcagccggagaacaactacaagaccacgcctcccgtgctggactccgacggctccttcgccctcgccagcaagctcaccgtggacaagagcaggtggcagcaggggaacgtcttctcatgctccgtgatgcatgaggctctgcacaaccactacacgcagaagagcctctccctgtccccgggtaaatga

SEQ ID NO: 152 - protein, 107 aa, Artificial Sequence
  Description of Artificial Sequence: Synthetic amino acid sequence
GQPREPQVYTLPPSREEMTKNQVSLTCLVKGFYPSDIAVEWESNGQPENNYKTTPPVLDSDGSFALASKLTVDKSRWQQGNVFSCSVMHEALHNHYTQKSLSLSPGK

SEQ ID NO: 153 - DNA, 1521 bp, Artificial Sequence
  Description of Artificial Sequence: Synthetic nucleotide sequence
aagcttgccgccatggattttcaagtgcagattttcagcttcctgctaatcagtgcttcagtcataattgccagaggacaaattgttctctcccagtctccagcaatcctgtctgcatctccaggggagaaggtcacaatgacttgcagggccagctcaagtgtaagttacatgcactggtaccagcagaagccaggatcctcccccaaaccctggatttatgccccatccaacctggcttctggagtccctgctcgcttcagtggcagtgggtctgggacctcttactctctcacaatcagcagagtggaggctgaagatgctgccacttattactgccagcagtggagttttaacccacccacgttcggtgctgggaccaagctggagctgaaagatggcggtggctcgggcggtggtggatctggaggaggtgggagctctcaggcttatctacagcagtctggggctgagctggtgaggcctggggcctcagtgaagatgtcctgcaaggcttctggctacacatttaccagttacaatatgcactgggtaaagcagacacctagacagggcctggaatggattggagctatttatccaggaaatggtgatacttcctacaatcagaagttcaagggcaaggccacactgactgtagacaaatcctccagcacagcctacatgcagctcagcagcctgacatctgaagactctgcggtctatttctgtgcaagagtggtgtactatagtaactcttactggtacttcgatgtctggggcacagggaccacggtcaccgtctcttctgatcaggagcccaaatcttctgacaaaactcacacatccccaccgtccccagcacctgaactcctggggggaccgtcagtcttcctcttccccccaaaacccaaggacaccctcatgatctcccggacccctgaggtcacatgcgtggtggtggacgtgagccacgaagaccctgaggtcaagttcaactggtacgtggacggcgtggaggtgcataatgccaagacaaagccgcgggaggagcagtacaacagcacgtaccgtgtggtcagcgtcctcaccgtcctgcaccaggactggctgaatggcaaggagtacaagtgcaaggtctccaacaaagccctcccagcccccatcgagaaaacaatctccaaagccaaagggcagccccgagaaccacaggtgtacaccctgcccccatcccgggaggagatgaccaagaaccaggtcagcctgacctgcctggtcaaaggcttctatcccagcgacatcgccgtggagtgggagagcaatgggcagccggagaacaactacaagaccacgcctcccgtgctggactccgacggctccttctacctctatagcaagctcaccgtggacaagagcaggtggcagcaggggaacgtcttctcatgctccgtgatgcatgaggctctgcacaaccactacacgcagaagagcctctccctgtccccgggtaaatgatctaga

SEQ ID NO: 154 - protein, 500 aa, Artificial Sequence
  Description of Artificial Sequence: Synthetic amino acid sequence
MDFQVQIFSFLLISASVIIARGQIVLSQSPAILSASPGEKVTMTCRASSSVSYMHWYQQKPGSSPKPWIYAPSNLASGVPARFSGSGSGTSYSLTISRVEAEDAATYYCQQWSFNPPTFGAGTKLELKDGGGSGGGGSGGGGSSQAYLQQSGAELVRPGASVKMSCKASGYTFTSYNMHWVKQTPRQGLEWIGAIYPGNGDTSYNQKFKGKATLTVDKSSSTAYMQLSSLTSEDSAVYFCARVVYYSNSYWYFDVWGTGTTVTVSSDQEPKSSDKTHTSPPSPAPELLGGPSVFLFPPKPKDTLMISRTPEVTCVVVDVSHEDPEVKFNWYVDGVEVHNAKTKPREEQYNSTYRVVSVLTVLHQDWLNGKEYKCKVSNKALPAPIEKTISKAKGQPREPQVYTLPPSREEMTKNQVSLTCLVKGFYPSDIAVEWESNGQPENNYKTTPPVLDSDGSFYLYSKLTVDKSRWQQGNVFSCSVMHEALHNHYTQKSLSLSPGK

SEQ ID NO: 155 - DNA, 1515 bp, Artificial Sequence
  Description of Artificial Sequence: Synthetic nucleotide sequence
aagcttgccgccatggattttcaagtgcagattttcagcttcctgctaatcagtgcttcagtcataattgccagaggacaaattgttctctcccagtctccagcaatcctgtctgcatctccaggggagaaggtcacaatgacttgcagggccagctcaagtgtaagttacatgcactggtaccagcagaagccaggatcctcccccaaaccctggatttatgccccatccaacctggcttctggagtccctgctcgcttcagtggcagtgggtctgggacctcttactctctcacaatcagcagagtggaggctgaagatgctgccacttattactgccagcagtggagttttaacccacccacgttcggtgctgggaccaagctggagctgaaagatggcggtggctcgggcggtggtggatctggaggaggtgggagctctcaggcttatctacagcagtctggggctgagctggtgaggcctggggcctcagtgaagatgtcctgcaaggcttctggctacacatttaccagttacaatatgcactgggtaaagcagacacctagacagggcctggaatggattggagctatttatccaggaaatggtgatacttcctacaatcagaagttcaagggcaaggccacactgactgtagacaaatcctccagcacagcctacatgcagctcagcagcctgacatctgaagactctgcggtctatttctgtgcaagagtggtgtactatagtaactcttactggtacttcgatgtctggggcacagggaccacggtcaccgtctcttctgatcaggagcccaaatcttctgacaaaactcacacatccccaccgtccccagcacctgaactcctggggggaccgtcagtcttcctcttccccccaaaacccaaggacaccctcatgatctcccggacccctgaggtcacatgcgtggtggtggacgtgagccacgaagaccctgaggtcaagttcaactggtacgtggacggcgtggaggtgcataatgccaagacaaagccgcgggaggagcagtacaacagcacgtaccgtgtggtcagcgtcctcaccgtcctgcaccaggactggctgaatggcaaggagtacaagtgcaaggtctccaacaaagccctcccagcccccatcgagaaaacaatctccaaagccaaagggcagccccgagaaccacaggtgtacaccctgcccccatcccgggaggagatgaccaagaaccaggtcagcctgacctgcctggtcaaaggcttctatcccagcgacatcgccgtggagtgggagagcaatgggcagccggagaacaactacaagaccacgcctcccgtgctggactccgacggctccttcgccctctatagcaagctcaccgtggacaagagcaggtggcagcaggggaacgtcttctcatgctccgtgatgcatgaggctctgcacaaccactacacgcagaagagcctctccctgtccccgggtaaatga

SEQ ID NO: 156 - protein, 500 aa, Artificial Sequence
  Description of Artificial Sequence: Synthetic amino acid sequence
MDFQVQIFSFLLISASVIIARGQIVLSQSPAILSASPGEKVTMTCRASSSVSYMHWYQQKPGSSPKPWIYAPSNLASGVPARFSGSGSGTSYSLTISRVEAEDAATYYCQQWSFNPPTFGAGTKLELKDGGGSGGGGSGGGGSSQAYLQQSGAELVRPGASVKMSCKASGYTFTSYNMHWVKQTPRQGLEWIGAIYPGNGDTSYNQKFKGKATLTVDKSSSTAYMQLSSLTSEDSAVYFCARVVYYSNSYWYFDVWGTGTTVTVSSDQEPKSSDKTHTSPPSPAPELLGGPSVFLFPPKPKDTLMISRTPEVTCVVVDVSHEDPEVKFNWYVDGVEVHNAKTKPREEQYNSTYRVVSVLTVLHQDWLNGKEYKCKVSNKALPAPIEKTISKAKGQPREPQVYTLPPSREEMTKNQVSLTCLVKGFYPSDIAVEWESNGQPENNYKTTPPVLDSDGSFALYSKLTVDKSRWQQGNVFSCSVMHEALHNHYTQKSLSLSPGK

SEQ ID NO: 157 - DNA, 1515 bp, Artificial Sequence
  Description of Artificial Sequence: Synthetic nucleotide sequence
aagcttgccgccatggattttcaagtgcagattttcagcttcctgctaatcagtgcttcagtcataattgccagaggacaaattgttctctcccagtctccagcaatcctgtctgcatctccaggggagaaggtcacaatgacttgcagggccagctcaagtgtaagttacatgcactggtaccagcagaagccaggatcctcccccaaaccctggatttatgccccatccaacctggcttctggagtccctgctcgcttcagtggcagtgggtctgggacctcttactctctcacaatcagcagagtggaggctgaagatgctgccacttattactgccagcagtggagttttaacccacccacgttcggtgctgggaccaagctggagctgaaagatggcggtggctcgggcggtggtggatctggaggaggtgggagctctcaggcttatctacagcagtctggggctgagctggtgaggcctggggcctcagtgaagatgtcctgcaaggcttctggctacacatttaccagttacaatatgcactgggtaaagcagacacctagacagggcctggaatggattggagctatttatccaggaaatggtgatacttcctacaatcagaagttcaagggcaaggccacactgactgtagacaaatcctccagcacagcctacatgcagctcagcagcctgacatctgaagactctgcggtctatttctgtgcaagagtggtgtactatagtaactcttactggtacttcgatgtctggggcacagggaccacggtcaccgtctcttctgatcaggagcccaaatcttctgacaaaactcacacatccccaccgtccccagcacctgaactcctggggggaccgtcagtcttcctcttccccccaaaacccaaggacaccctcatgatctcccggacccctgaggtcacatgcgtggtggtggacgtgagccacgaagaccctgaggtcaagttcaactggtacgtggacggcgtggaggtgcataatgccaagacaaagccgcgggaggagcagtacaacagcacgtaccgtgtggtcagcgtcctcaccgtcctgcaccaggactggctgaatggcaaggagtacaagtgcaaggtctccaacaaagccctcccagcccccatcgagaaaacaatctccaaagccaaagggcagccccgagaaccacaggtgtacaccctgcccccatcccgggaggagatgaccaagaaccaggtcagcctgacctgcctggtcaaaggcttctatcccagcgacatcgccgtggagtgggagagcaatgggcagccggagaacaactacaagaccacgcctcccgtgctggactccgacggctccttcttcctcgccagcaagctcaccgtggacaagagcaggtggcagcaggggaacgtcttctcatgctccgtgatgcatgaggctctgcacaaccactacacgcagaagagcctctccctgtccccgggtaaatga

SEQ ID NO: 158 - protein, 500 aa, Artificial Sequence
  Description of Artificial Sequence: Synthetic amino acid sequence
MDFQVQIFSFLLISASVIIARGQIVLSQSPAILSASPGEKVTMTCRASSSVSYMHWYQQKPGSSPKPWIYAPSNLASGVPARFSGSGSGTSYSLTISRVEAEDAATYYCQQWSFNPPTFGAGTKLELKDGGGSGGGGSGGGGSSQAYLQQSGAELVRPGASVKMSCKASGYTFTSYNMHWVKQTPRQGLEWIGAIYPGNGDTSYNQKFKGKATLTVDKSSSTAYMQLSSLTSEDSAVYFCARVVYYSNSYWYFDVWGTGTTVTVSSDQEPKSSDKTHTSPPSPAPELLGGPSVFLFPPKPKDTLMISRTPEVTCVVVDVSHEDPEVKFNWYVDGVEVHNAKTKPREEQYNSTYRVVSVLTVLHQDWLNGKEYKCKVSNKALPAPIEKTISKAKGQPREPQVYTLPPSREEMTKNQVSLTCLVKGFYPSDIAVEWESNGQPENNYKTTPPVLDSDGSFFLASKLTVDKSRWQQGNVFSCSVMHEALHNHYTQKSLSLSPGK

SEQ ID NO: 159 - DNA, 1515 bp, Artificial Sequence
  Description of Artificial Sequence: Synthetic nucleotide sequence
aagcttgccgccatggattttcaagtgcagattttcagcttcctgctaatcagtgcttcagtcataattgccagaggacaaattgttctctcccagtctccagcaatcctgtctgcatctccaggggagaaggtcacaatgacttgcagggccagctcaagtgtaagttacatgcactggtaccagcagaagccaggatcctcccccaaaccctggatttatgccccatccaacctggcttctggagtccctgctcgcttcagtggcagtgggtctgggacctcttactctctcacaatcagcagagtggaggctgaagatgctgccacttattactgccagcagtggagttttaacccacccacgttcggtgctgggaccaagctggagctgaaagatggcggtggctcgggcggtggtggatctggaggaggtgggagctctcaggcttatctacagcagtctggggctgagctggtgaggcctggggcctcagtgaagatgtcctgcaaggcttctggctacacatttaccagttacaatatgcactgggtaaagcagacacctagacagggcctggaatggattggagctatttatccaggaaatggtgatacttcctacaatcagaagttcaagggcaaggccacactgactgtagacaaatcctccagcacagcctacatgcagctcagcagcctgacatctgaagactctgcggtctatttctgtgcaagagtggtgtactatagtaactcttactggtacttcgatgtctggggcacagggaccacggtcaccgtctcttctgatcaggagcccaaatcttctgacaaaactcacacatccccaccgtccccagcacctgaactcctggggggaccgtcagtcttcctcttccccccaaaacccaaggacaccctcatgatctcccggacccctgaggtcacatgcgtggtggtggacgtgagccacgaagaccctgaggtcaagttcaactggtacgtggacggcgtggaggtgcataatgccaagacaaagccgcgggaggagcagtacaacagcacgtaccgtgtggtcagcgtcctcaccgtcctgcaccaggactggctgaatggcaaggagtacaagtgcaaggtctccaacaaagccctcccagcccccatcgagaaaacaatctccaaagccaaagggcagccccgagaaccacaggtgtacaccctgcccccatcccgggaggagatgaccaagaaccaggtcagcctgacctgcctggtcaaaggcttctatcccagcgacatcgccgtggagtgggagagcaatgggcagccggagaacaactacaagaccacgcctcccgtgctggactccgacggctccttctacctcgccagcaagctcaccgtggacaagagcaggtggcagcaggggaacgtcttctcatgctccgtgatgcatgaggctctgcacaaccactacacgcagaagagcctctccctgtccccgggtaaatga

SEQ ID NO: 160 - protein, 500 aa, Artificial Sequence
  Description of Artificial Sequence: Synthetic amino acid sequence
MDFQVQIFSFLLISASVIIARGQIVLSQSPAILSASPGEKVTMTCRASSSVSYMHWYQQKPGSSPKPWIYAPSNLASGVPARFSGSGSGTSYSLTISRVEAEDAATYYCQQWSFNPPTFGAGTKLELKDGGGSGGGGSGGGGSSQAYLQQSGAELVRPGASVKMSCKASGYTFTSYNMHWVKQTPRQGLEWIGAIYPGNGDTSYNQKFKGKATLTVDKSSSTAYMQLSSLTSEDSAVYFCARVVYYSNSYWYFDVWGTGTTVTVSSDQEPKSSDKTHTSPPSPAPELLGGPSVFLFPPKPKDTLMISRTPEVTCVVVDVSHEDPEVKFNWYVDGVEVHNAKTKPREEQYNSTYRVVSVLTVLHQDWLNGKEYKCKVSNKALPAPIEKTISKAKGQPREPQVYTLPPSREEMTKNQVSLTCLVKGFYPSDIAVEWESNGQPENNYKTTPPVLDSDGSFYLASKLTVDKSRWQQGNVFSCSVMHEALHNHYTQKSLSLSPGK

SEQ ID NO: 161 - DNA, 1515 bp, Artificial Sequence
  Description of Artificial Sequence: Synthetic nucleotide sequence
aagcttgccgccatggattttcaagtgcagattttcagcttcctgctaatcagtgcttcagtcataattgccagaggacaaattgttctctcccagtctccagcaatcctgtctgcatctccaggggagaaggtcacaatgacttgcagggccagctcaagtgtaagttacatgcactggtaccagcagaagccaggatcctcccccaaaccctggatttatgccccatccaacctggcttctggagtccctgctcgcttcagtggcagtgggtctgggacctcttactctctcacaatcagcagagtggaggctgaagatgctgccacttattactgccagcagtggagttttaacccacccacgttcggtgctgggaccaagctggagctgaaagatggcggtggctcgggcggtggtggatctggaggaggtgggagctctcaggcttatctacagcagtctggggctgagctggtgaggcctggggcctcagtgaagatgtcctgcaaggcttctggctacacatttaccagttacaatatgcactgggtaaagcagacacctagacagggcctggaatggattggagctatttatccaggaaatggtgatacttcctacaatcagaagttcaagggcaaggccacactgactgtagacaaatcctccagcacagcctacatgcagctcagcagcctgacatctgaagactctgcggtctatttctgtgcaagagtggtgtactatagtaactcttactggtacttcgatgtctggggcacagggaccacggtcaccgtctcttctgatcaggagcccaaatcttctgacaaaactcacacatccccaccgtccccagcacctgaactcctggggggaccgtcagtcttcctcttccccccaaaacccaaggacaccctcatgatctcccggacccctgaggtcacatgcgtggtggtggacgtgagccacgaagaccctgaggtcaagttcaactggtacgtggacggcgtggaggtgcataatgccaagacaaagccgcgggaggagcagtacaacagcacgtaccgtgtggtcagcgtcctcaccgtcctgcaccaggactggctgaatggcaaggagtacaagtgcaaggtctccaacaaagccctcccagcccccatcgagaaaacaatctccaaagccaaagggcagccccgagaaccacaggtgtacaccctgcccccatcccgggaggagatgaccaagaaccaggtcagcctgacctgcctggtcaaaggcttctatcccagcgacatcgccgtggagtgggagagcaatgggcagccggagaacaactacaagaccacgcctcccgtgctggactccgacggctccttcgccctcgccagcaagctcaccgtggacaagagcaggtggcagcaggggaacgtcttctcatgctccgtgatgcatgaggctctgcacaaccactacacgcagaagagcctctccctgtccccgggtaaatga

SEQ ID NO: 162 - protein, 500 aa, Artificial Sequence
  Description of Artificial Sequence: Synthetic amino acid sequence
MDFQVQIFSFLLISASVIIARGQIVLSQSPAILSASPGEKVTMTCRASSSVSYMHWYQQKPGSSPKPWIYAPSNLASGVPARFSGSGSGTSYSLTISRVEAEDAATYYCQQWSFNPPTFGAGTKLELKDGGGSGGGGSGGGGSSQAYLQQSGAELVRPGASVKMSCKASGYTFTSYNMHWVKQTPRQGLEWIGAIYPGNGDTSYNQKFKGKATLTVDKSSSTAYMQLSSLTSEDSAVYFCARVVYYSNSYWYFDVWGTGTTVTVSSDQEPKSSDKTHTSPPSPAPELLGGPSVFLFPPKPKDTLMISRTPEVTCVVVDVSHEDPEVKFNWYVDGVEVHNAKTKPREEQYNSTYRVVSVLTVLHQDWLNGKEYKCKVSNKALPAPIEKTISKAKGQPREPQVYTLPPSREEMTKNQVSLTCLVKGFYPSDIAVEWESNGQPENNYKTTPPVLDSDGSFALASKLTVDKSRWQQGNVFSCSVMHEALHNHYTQKSLSLSPGK

SEQ ID NO: 163 - DNA, 1521 bp, Artificial Sequence
  Description of Artificial Sequence: Synthetic nucleotide sequence
aagcttgccgccatggattttcaagtgcagattttcagcttcctgctaatcagtgcttcagtcataattgccagaggacaaattgttctctcccagtctccagcaatcctgtctgcatctccaggggagaaggtcacaatgacttgcagggccagctcaagtgtaagttacatgcactggtaccagcagaagccaggatcctcccccaaaccctggatttatgccccatccaacctggcttctggagtccctgctcgcttcagtggcagtgggtctgggacctcttactctctcacaatcagcagagtggaggctgaagatgctgccacttattactgccagcagtggagttttaacccacccacgttcggtgctgggaccaagctggagctgaaagatggcggtggctcgggcggtggtggatctggaggaggtgggagctctcaggcttatctacagcagtctggggctgagctggtgaggcctggggcctcagtgaagatgtcctgcaaggcttctggctacacatttaccagttacaatatgcactgggtaaagcagacacctagacagggcctggaatggattggagctatttatccaggaaatggtgatacttcctacaatcagaagttcaagggcaaggccacactgactgtagacaaatcctccagcacagcctacatgcagctcagcagcctgacatctgaagactctgcggtctatttctgtgcaagagtggtgtactatagtaactcttactggtacttcgatgtctggggcacagggaccacggtcaccgtctcttctgatcaggagcccaaatcttctgacaaaactcacacatgcccaccgtgcccagcacctgaactcctggggggaccgtcagtcttcctcttccccccaaaacccaaggacaccctcatgatctcccggacccctgaggtcacatgcgtggtggtggacgtgagccacgaagaccctgaggtcaagttcaactggtacgtggacggcgtggaggtgcataatgccaagacaaagccgcgggaggagcagtacaacagcacgtaccgtgtggtcagcgtcctcaccgtcctgcaccaggactggctgaatggcaaggagtacaagtgcaaggtctccaacaaagccctcccagcccccatcgagaaaacaatctccaaagccaaagggcagccccgagaaccacaggtgtacaccctgcccccatcccgggatgagctgaccaagaaccaggtcagcctgacctgcctggtcaaaggcttctatcccagcgacatcgccgtggagtgggagagcaatgggcagccggagaacaactacaagaccacgcctcccgtgctggactccgacggctccttcttcctctacagcaagctcaccgtggacaagagcaggtggcagcaggggaacgtcttctcatgctccgtgatgcatgaggctctgcacaaccactacacgcagaagagcctctccctgtctccgggtaaatgatctaga

SEQ ID NO: 164 - protein, 500 aa, Artificial Sequence
  Description of Artificial Sequence: Synthetic amino acid sequence
MDFQVQIFSFLLISASVIIARGQIVLSQSPAILSASPGEKVTMTCRASSSVSYMHWYQQKPGSSPKPWIYAPSNLASGVPARFSGSGSGTSYSLTISRVEAEDAATYYCQQWSFNPPTFGAGTKLELKDGGGSGGGGSGGGGSSQAYLQQSGAELVRPGASVKMSCKASGYTFTSYNMHWVKQTPRQGLEWIGAIYPGNGDTSYNQKFKGKATLTVDKSSSTAYMQLSSLTSEDSAVYFCARVVYYSNSYWYFDVWGTGTTVTVSSDQEPKSSDKTHTCPPCPAPELLGGPSVFLFPPKPKDTLMISRTPEVTCVVVDVSHEDPEVKFNWYVDGVEVHNAKTKPREEQYNSTYRVVSVLTVLHQDWLNGKEYKCKVSNKALPAPIEKTISKAKGQPREPQVYTLPPSRDELTKNQVSLTCLVKGFYPSDIAVEWESNGQPENNYKTTPPVLDSDGSFFLYSKLTVDKSRWQQGNVFSCSVMHEALHNHYTQKSLSLSPGK

SEQ ID NO: 165 - DNA, 1521 bp, Artificial Sequence
  Description of Artificial Sequence: Synthetic nucleotide sequence
aagcttgccgccatggattttcaagtgcagattttcagcttcctgctaatcagtgcttcagtcataattgccagaggacaaattgttctctcccagtctccagcaatcctgtctgcatctccaggggagaaggtcacaatgacttgcagggccagctcaagtgtaagttacatgcactggtaccagcagaagccaggatcctcccccaaaccctggatttatgccccatccaacctggcttctggagtccctgctcgcttcagtggcagtgggtctgggacctcttactctctcacaatcagcagagtggaggctgaagatgctgccacttattactgccagcagtggagttttaacccacccacgttcggtgctgggaccaagctggagctgaaagatggcggtggctcgggcggtggtggatctggaggaggtgggagctctcaggcttatctacagcagtctggggctgagctggtgaggcctggggcctcagtgaagatgtcctgcaaggcttctggctacacatttaccagttacaatatgcactgggtaaagcagacacctagacagggcctggaatggattggagctatttatccaggaaatggtgatacttcctacaatcagaagttcaagggcaaggccacactgactgtagacaaatcctccagcacagcctacatgcagctcagcagcctgacatctgaagactctgcggtctatttctgtgcaagagtggtgtactatagtaactcttactggtacttcgatgtctggggcacagggaccacggtcaccgtctcttctgatcaggagcccaaatcttgtgacaaaactcacacatctccaccgtgcccagcacctgaactcctggggggaccgtcagtcttcctcttccccccaaaacccaaggacaccctcatgatctcccggacccctgaggtcacatgcgtggtggtggacgtgagccacgaagaccctgaggtcaagttcaactggtacgtggacggcgtggaggtgcataatgccaagacaaagccgcgggaggagcagtacaacagcacgtaccgtgtggtcagcgtcctcaccgtcctgcaccaggactggctgaatggcaaggagtacaagtgcaaggtctccaacaaagccctcccagcccccatcgagaaaacaatctccaaagccaaagggcagccccgagaaccacaggtgtacaccctgcccccatcccgggatgagctgaccaagaaccaggtcagcctgacctgcctggtcaaaggcttctatcccagcgacatcgccgtggagtgggagagcaatgggcagccggagaacaactacaagaccacgcctcccgtgctggactccgacggctccttcttcctctacagcaagctcaccgtggacaagagcaggtggcagcaggggaacgtcttctcatgctccgtgatgcatgaggctctgcacaaccactacacgcagaagagcctctccctgtctccgggtaaatgatctaga

SEQ ID NO: 166 - protein, 500 aa, Artificial Sequence
  Description of Artificial Sequence: Synthetic amino acid sequence
MDFQVQIFSFLLISASVIIARGQIVLSQSPAILSASPGEKVTMTCRASSSVSYMHWYQQKPGSSPKPWIYAPSNLASGVPARFSGSGSGTSYSLTISRVEAEDAATYYCQQWSFNPPTFGAGTKLELKDGGGSGGGGSGGGGSSQAYLQQSGAELVRPGASVKMSCKASGYTFTSYNMHWVKQTPRQGLEWIGAIYPGNGDTSYNQKFKGKATLTVDKSSSTAYMQLSSLTSEDSAVYFCARVVYYSNSYWYFDVWGTGTTVTVSSDQEPKSCDKTHTSPPCPAPELLGGPSVFLFPPKPKDTLMISRTPEVTCVVVDVSHEDPEVKFNWYVDGVEVHNAKTKPREEQYNSTYRVVSVLTVLHQDWLNGKEYKCKVSNKALPAPIEKTISKAKGQPREPQVYTLPPSRDELTKNQVSLTCLVKGFYPSDIAVEWESNGQPENNYKTTPPVLDSDGSFFLYSKLTVDKSRWQQGNVFSCSVMHEALHNHYTQKSLSLSPGK

SEQ ID NO: 167 - DNA, 1521 bp, Artificial Sequence
  Description of Artificial Sequence: Synthetic nucleotide sequence
aagcttgccgccatggattttcaagtgcagattttcagcttcctgctaatcagtgcttcagtcataattgccagaggacaaattgttctctcccagtctccagcaatcctgtctgcatctccaggggagaaggtcacaatgacttgcagggccagctcaagtgtaagttacatgcactggtaccagcagaagccaggatcctcccccaaaccctggatttatgccccatccaacctggcttctggagtccctgctcgcttcagtggcagtgggtctgggacctcttactctctcacaatcagcagagtggaggctgaagatgctgccacttattactgccagcagtggagttttaacccacccacgttcggtgctgggaccaagctggagctgaaagatggcggtggctcgggcggtggtggatctggaggaggtgggagctctcaggcttatctacagcagtctggggctgagctggtgaggcctggggcctcagtgaagatgtcctgcaaggcttctggctacacatttaccagttacaatatgcactgggtaaagcagacacctagacagggcctggaatggattggagctatttatccaggaaatggtgatacttcctacaatcagaagttcaagggcaaggccacactgactgtagacaaatcctccagcacagcctacatgcagctcagcagcctgacatctgaagactctgcggtctatttctgtgcaagagtggtgtactatagtaactcttactggtacttcgatgtctggggcacagggaccacggtcaccgtctcttctgatcaggagcccaaatcttgtgacaaaactcacacatgtccaccgtccccagcacctgaactcctggggggaccgtcagtcttcctcttccccccaaaacccaaggacaccctcatgatctcccggacccctgaggtcacatgcgtggtggtggacgtgagccacgaagaccctgaggtcaagttcaactggtacgtggacggcgtggaggtgcataatgccaagacaaagccgcgggaggagcagtacaacagcacgtaccgtgtggtcagcgtcctcaccgtcctgcaccaggactggctgaatggcaaggagtacaagtgcaaggtctccaacaaagccctcccagcccccatcgagaaaacaatctccaaagccaaagggcagccccgagaaccacaggtgtacaccctgcccccatcccgggatgagctgaccaagaaccaggtcagcctgacctgcctggtcaaaggcttctatcccagcgacatcgccgtggagtgggagagcaatgggcagccggagaacaactacaagaccacgcctcccgtgctggactccgacggctccttcttcctctacagcaagctcaccgtggacaagagcaggtggcagcaggggaacgtcttctcatgctccgtgatgcatgaggctctgcacaaccactacacgcagaagagcctctccctgtctccgggtaaatgatctaga

SEQ ID NO: 168 - protein, 500 aa, Artificial Sequence
  Description of Artificial Sequence: Synthetic amino acid sequence
MDFQVQIFSFLLISASVIIARGQIVLSQSPAILSASPGEKVTMTCRASSSVSYMHWYQQKPGSSPKPWIYAPSNLASGVPARFSGSGSGTSYSLTISRVEAEDAATYYCQQWSFNPPTFGAGTKLELKDGGGSGGGGSGGGGSSQAYLQQSGAELVRPGASVKMSCKASGYTFTSYNMHWVKQTPRQGLEWIGAIYPGNGDTSYNQKFKGKATLTVDKSSSTAYMQLSSLTSEDSAVYFCARVVYYSNSYWYFDVWGTGTTVTVSSDQEPKSCDKTHTCPPSPAPELLGGPSVFLFPPKPKDTLMISRTPEVTCVVVDVSHEDPEVKFNWYVDGVEVHNAKTKPREEQYNSTYRVVSVLTVLHQDWLNGKEYKCKVSNKALPAPIEKTISKAKGQPREPQVYTLPPSRDELTKNQVSLTCLVKGFYPSDIAVEWESNGQPENNYKTTPPVLDSDGSFFLYSKLTVDKSRWQQGNVFSCSVMHEALHNHYTQKSLSLSPGK

SEQ ID NO: 169 - DNA, 766 bp, Artificial Sequence
  Description of Artificial Sequence: Synthetic nucleotide sequence
tgatcagccagttccctcaactccacctaccccatctccctcaactccacctaccccatctccctcatgctgccacccccgactgtcactgcaccgaccggccctcgaggacctgctcttaggttcagaagcgatcctcacgtgcacactgaccggcctgagagatgcctcaggtgtcaccttcacctggacgccctcaagtgggaagagcgctgttcaaggaccacctgaccgtgacctctgtggctgctacagcgtgtccagtgtcctgccgggctgtgccgagccatggaaccatgggaagaccttcacttgcactgctgcctaccccgagtccaagaccccgctaaccgccaccctctcaaaatccggaaacacattccggcccgaggtccacctgctgccgccgccgtcggaggagctggccctgaacgagctggtgacgctgacgtgcctggcacgtggcttcagccccaaggatgtgctggttcgctggctgcaggggtcacaggagctgccccgcgagaagtacctgacttgggcatcccggcaggagcccagccagggcaccaccaccttcgctgtgaccagcatactgcgcgtggcagccgaggactggaagaagggggacaccttctcctgcatggtgggccacgaggccctgccgctggccttcacacagaagaccatcgaccgcttggcgggtaaacccacccatgtcaatgtgtctgttgtcatggcggaggtggacgcggatccttcgaac

SEQ ID NO: 170 - protein, 255 aa, Artificial Sequence
  Description of Artificial Sequence: Synthetic amino acid sequence
DQPVPSTPPTPSPSTPPTPSPSCCHPRLSLHRPALEDLLLGSEAILTCTLTGLRDASGVTFTWTPSSGKSAVQGPPDRDLCGCYSVSSVLPGCAEPWNHGKTFTCTAAYPESKTPLTATLSKSGNTFRPEVHLLPPPSEELALNELVTLTCLARGFSPKDVLVRWLQGSQELPREKYLTWASRQEPSQGTTTFAVTSILRVAAEDWKKGDTFSCMVGHEALPLAFTQKTIDRLAGKPTHVNVSVVMAEVDADPSN

SEQ ID NO: 171 - DNA, 1697 bp, Artificial sequence
  Description of Artificial Sequence: Synthetic nucleotide sequence
aagcttatggattttcaagtgcagattttcagcttcctgctaatcagtgcttcagtcataatgtccagaggagtcgacattgtgctcactcagtctccaacaaccatagctgcatctccaggggagaaggtcaccatcacctgccgtgccagctccagtgtaagttacatgtactggtaccagcagaagtcaggcgcctcccctaaactctggatttatgacacatccaagctggcttctggagttccaaatcgcttcagtggcagtgggtctgggacctcttattctctcgcaatcaacaccatggagactgaagatgctgccacttattactgtcagcagtggagtagtactccgctcacgttcgggtctgggaccaagctggagatcaaacggggtggcggtggctcgggcggtggtgggtcgggtggcggcggatctcaggtgcagctgaaggaggcaggacctggcctggtgcaaccgacacagaccctgtccctcacatgcactgtctctgggttctcattaaccagcgatggtgtacactggattcgacagcctccaggaaagggtctggaatggatgggaataatatattatgatggaggcacagattataattcagcaattaaatccagactgagcatcagcagggacacctccaagagccaagttttcttaaaaatcaacagtctgcaaactgatgacacagccatgtattactgtgccagaatccactttgattactggggccaaggagtcatggtcacagtctcctctgatcagccagttccctcaactccacctaccccatctccctcaactccacctaccccatctccctcatgctgccacccccgactgtcactgcaccgaccggccctcgaggacctgctcttaggttcagaagcgatcctcacgtgcacactgaccggcctgagagatgcctcaggtgtcaccttcacctggacgccctcaagtgggaagagcgctgttcaaggaccacctgaccgtgacctctgtggctgctacagcgtgtccagtgtcctgccgggctgtgccgagccatggaaccatgggaagaccttcacttgcactgctgcctaccccgagtccaagaccccgctaaccgccaccctctcaaaatccggaaacacattccggcccgaggtccacctgctgccgccgccgtcggaggagctggccctgaacgagctggtgacgctgacgtgcctggcacgtggcttcagccccaaggatgtgctggttcgctggctgcaggggtcacaggagctgccccgcgagaagtacctgacttgggcatcccggcaggagcccagccagggcaccaccaccttcgctgtgaccagcatactgcgcgtggcagccgaggactggaagaagggggacaccttctcctgcatggtgggccacgaggccctgccgctggccttcacacagaagaccatcgaccgcttggcgggtaaacccacccatgtcaatgtgtctgttgtcatggcggaggtggacgcggatccttcgaacaacctgctcccatcctgggccattaccttaatctcagtaaatggaatttttgtgatatgctgcctgacctactgctttgccccaagatgcagagagagaaggaggaatgagagattgagaagggaaagtgtacgccctgtataaatcgatac

SEQ ID NO: 172 - protein, 560 aa, Artificial sequence
  Description of Artificial Sequence: Synthetic amino acid sequence
MDFQVQIFSFLLISASVIMSRGVDIVLTQSPTTIAASPGEKVTITCRASSSVSYMYWYQQKSGASPKLWIYDTSKLASGVPNRFSGSGSGTSYSLAINTMETEDAATYYCQQWSSTPLTFGSGTKLEIKRGGGGSGGGGSGGGGSQVQLKEAGPGLVQPTQTLSLTCTVSGFSLTSDGVHWIRQPPGKGLEWMGIIYYDGGTDYNSAIKSRLSISRDTSKSQVFLKINSLQTDDTAMYYCARIHFDYWGQGVMVTVSSDQPVPSTPPTPSPSTPPTPSPSCCHPRLSLHRPALEDLLLGSEAILTCTLTGLRDASGVTFTWTPSSGKSAVQGPPDRDLCGCYSVSSVLPGCAEPWNHGKTFTCTAAYPESKTPLTATLSKSGNTFRPEVHLLPPPSEELALNELVTLTCLARGFSPKDVLVRWLQGSQELPREKYLTWASRQEPSQGTTTFAVTSILRVAAEDWKKGDTFSCMVGHEALPLAFTQKTIDRLAGKPTHVNVSVVMAEVDADPSNNLLPSWAITLISVNGIFVICCLTYCFAPRCRERRRNERLRRESVRPV

SEQ ID NO: 173 - DNA, 996 bp, Homo sapiens; identical to SEQ ID NO: 96

SEQ ID NO: 174 - protein, 331 aa, Homo sapiens; identical to SEQ ID NO: 97

SEQ ID NO: 175 - DNA, 1921 bp, Homo sapiens
aagcttatggattttcaagtgcagattttcagcttcctgctaatcagtgcttcagtcataatgtccagaggagtcgacattgtgctcactcagtctccaacaaccatagctgcatctccaggggagaaggtcaccatcacctgccgtgccagctccagtgtaagttacatgtactggtaccagcagaagtcaggcgcctcccctaaactctggatttatgacacatccaagctggcttctggagttccaaatcgcttcagtggcagtgggtctgggacctcttattctctcgcaatcaacaccatggagactgaagatgctgccacttattactgtcagcagtggagtagtactccgctcacgttcgggtctgggaccaagctggagatcaaacggggtggcggtggctcgggcggtggtgggtcgggtggcggcggatctcaggtgcagctgaaggaggcaggacctggcctggtgcaaccgacacagaccctgtccctcacatgcactgtctctgggttctcattaaccagcgatggtgtacactggattcgacagcctccaggaaagggtctggaatggatgggaataatatattatgatggaggcacagattataattcagcaattaaatccagactgagcatcagcagggacacctccaagagccaagttttcttaaaaatcaacagtctgcaaactgatgacacagccatgtattactgtgccagaatccactttgattactggggccaaggagtcatggtcacagtctcctctgatcacgtctgctccagggacttcaccccgcccaccgtgaagatcttacagtcgtcctgcgacggcggcgggcacttccccccgaccatccagctcctgtgcctcgtctctgggtacaccccagggactatcaacatcacctggctggaggacgggcaggtcatggacgtggacttgtccaccgcctctaccacgcaggagggtgagctggcctccacacaaagcgagctcaccctcagccagaagcactggctgtcagaccgcacctacacctgccaggtcacctatcaaggtcacacctttgaggacagcaccaagaagtgtgcagattccaacccgagaggggtgagcgcctacctaagccggcccagcccgttcgacctgttcatccgcaagtcgcccacgatcacctgtctggtggtggacctggcacccagcaaggggaccgtgaacctgacctggtcccgggccagtgggaagcctgtgaaccactccaccagaaaggaggagaagcagcgcaatggcacgttaaccgtcacgtccaccctgccggtgggcacccgagactggatcgagggggagacctaccagtgcagggtgacccacccccacctgcccagggccctcatgcggtccacgaccaagaccagcggcccgcgtgctgccccggaagtctatgcgtttgcgacgccggagtggccggggagccgggacaagcgcaccctcgcctgcctgatccagaacttcatgcctgaggacatctcggtgcagtggctgcacaacgaggtgcagctcccggacgcccggcacagcacgacgcagccccgcaagaccaagggctccggcttcttcgtcttcagccgcctggaggtgaccagggccgaatgggagcagaaagatgagttcatctgccgtgcagtccatgaggcagcgagcccctcacagaccgtccagcgagcggtgtctgtaaatcccggtaaagcggatccttcgaagctcccatcctgggccattaccttaatctcagtaaatggaatttttgtgatatgctgcctgacctactgctttgccccaagatgcagagagagaaggaggaatgagagattgagaagggaaagtgtacgccctgtataaatcgata

SEQ ID NO: 176 - protein, 635 aa, Homo sapiens
MDFQVQIFSFLLISASVIMSRGVDIVLTQSPTTIAASPGEKVTITCRASSSVSYMYWYQQKSGASPKLWIYDTSKLASGVPNRFSGSGSGTSYSLAINTMETEDAATYYCQQWSSTPLTFGSGTKLEIKRGGGGSGGGGSGGGGSQVQLKEAGPGLVQPTQTLSLTCTVSGFSLTSDGVHWIRQPPGKGLEWMGIIYYDGGTDYNSAIKSRLSISRDTSKSQVFLKINSLQTDDTAMYYCARIHFDYWGQGVMVTVSSDHVCSRDFTPPTVKILQSSCDGGGHFPPTIQLLCLVSGYTPGTINITWLEDGQVMDVDLSTASTTQEGELASTQSELTLSQKHWLSDRTYTCQVTYQGHTFEDSTKKCADSNPRGVSAYLSRPSPFDLFIRKSPTITCLVVDLAPSKGTVNLTWSRASGKPVNHSTRKEEKQRNGTLTVTSTLPVGTRDWIEGETYQCRVTHPHLPRALMRSTTKTSGPRAAPEVYAFATPEWPGSRDKRTLACLIQNFMPEDISVQWLHNEVQLPDARHSTTQPRKTKGSGFFVFSRLEVTRAEWEQKDEFICRAVHEAASPSQTVQRAVSVNPGKADPSKLPSWAITLISVNGIFVICCLTYCFAPRCRERRRNERLRRESVRPV

SEQ ID NO: 177 - DNA, 1742 bp, Artificial sequence
  Description of Artificial Sequence: Synthetic nucleotide sequence
aagcttgccgccatgaggttctctgctcagcttctggggctgcttgtgctctggatccctggatccactgcagatattgtgatgacgcaggctgcattctccaatccagtcactcttggaacatcagcttccatctcctgcaggtctagtaagagtctcctacatagtaatggcatcacttatttgtattggtatctgcagaagccaggccagtctcctcagctcctgatttatcagatgtccaaccttgcctcaggagtcccagacaggttcagtagcagtgggtcaggaactgatttcacactgagaatcagcagagtggaggctgaggatgtgggtgtttattactgtgctcaaaatctagaacttccgctcacgttcggtgctgggaccaagctggagctgaaacggggtggcggtggctcgggcggtggtgggtcgggtggcggcggatcgtcacaggtgcagctgaagcagtcaggacctggcctagtgcagtcctcacagagcctgtccatcacctgcacagtctctggtttctcattaactacctatgctgtacactgggttcgccagtctccaggaaagggtctggagtggctgggagtgatatggagtggtggaatcacagactataatgcagctttcatatccagactgagcatcaccaaggacgattccaagagccaagttttctttaaaatgaacagtctgcaacctaatgacacagccatttattactgtgccagaaatgggggtgataactacccttattactatgctatggactactggggtcaaggaacctcagtcaccgtctcctctgatcagccagttccctcaactccacctaccccatctccctcaactccacctaccccatctccctcatgctgccacccccgactgtcactgcaccgaccggccctcgaggacctgctcttaggttcagaagcgatcctcacgtgcacactgaccggcctgagagatgcctcaggtgtcaccttcacctggacgccctcaagtgggaagagcgctgttcaaggaccacctgaccgtgacctctgtggctgctacagcgtgtccagtgtcctgccgggctgtgccgagccatggaaccatgggaagaccttcacttgcactgctgcctaccccgagtccaagaccccgctaaccgccaccctctcaaaatccggaaacacattccggcccgaggtccacctgctgccgccgccgtcggaggagctggccctgaacgagctggtgacgctgacgtgcctggcacgtggcttcagccccaaggatgtgctggttcgctggctgcaggggtcacaggagctgccccgcgagaagtacctgacttgggcatcccggcaggagcccagccagggcaccaccaccttcgctgtgaccagcatactgcgcgtggcagccgaggactggaagaagggggacaccttctcctgcatggtgggccacgaggccctgccgctggccttcacacagaagaccatcgaccgcttggcgggtaaacccacccatgtcaatgtgtctgttgtcatggcggaggtggacgcggatccttcgaacaacctgctcccatcctgggccattaccttaatctcagtaaatggaatttttgtgatatgctgcctgacctactgctttgccccaagatgcagagagagaaggaggaatgagagattgagaagggaaagtgtacgccctgtataaatcgatac

SEQ ID NO: 178 - protein, 573 aa, Artificial sequence
  Description of Artificial Sequence: Synthetic amino acid sequence
MRFSAQLLGLLVLWIPGSTADIVMTQAAFSNPVTLGTSASISCRSSKSLLHSNGITYLYWYLQKPGQSPQLLIYQMSNLASGVPDRFSSSGSGTDFTLRISRVEAEDVGVYYCAQNLELPLTFGAGTKLELKRGGGGSGGGGSGGGGSSQVQLKQSGPGLVQSSQSLSITCTVSGFSLTTYAVHWVRQSPGKGLEWLGVIWSGGITDYNAAFISRLSITKDDSKSQVFFKMNSLQPNDTAIYYCARNGGDNYPYYYAMDYWGQGTSVTVSSDQPVPSTPPTPSPSTPPTPSPSCCHPRLSLHRPALEDLLLGSEAILTCTLTGLRDASGVTFTWTPSSGKSAVQGPPDRDLCGCYSVSSVLPGCAEPWNHGKTFTCTAAYPESKTPLTATLSKSGNTFRPEVHLLPPPSEELALNELVTLTCLARGFSPKDVLVRWLQGSQELPREKYLTWASRQEPSQGTTTFAVTSILRVAAEDWKKGDTFSCMVGHEALPLAFTQKTIDRLAGKPTHVNVSVVMAEVDADPSNNLLPSWAITLISVNGIFVICCLTYCFAPRCRERRRNERLRRESVRPV

SEQ ID NO: 179 - DNA, 1966 bp, Homo sapiens
aagcttgccgccatgaggttctctgctcagcttctggggctgcttgtgctctggatccctggatccactgcagatattgtgatgacgcaggctgcattctccaatccagtcactcttggaacatcagcttccatctcctgcaggtctagtaagagtctcctacatagtaatggcatcacttatttgtattggtatctgcagaagccaggccagtctcctcagctcctgatttatcagatgtccaaccttgcctcaggagtcccagacaggttcagtagcagtgggtcaggaactgatttcacactgagaatcagcagagtggaggctgaggatgtgggtgtttattactgtgctcaaaatctagaacttccgctcacgttcggtgctgggaccaagctggagctgaaacggggtggcggtggctcgggcggtggtgggtcgggtggcggcggatcgtcacaggtgcagctgaagcagtcaggacctggcctagtgcagtcctcacagagcctgtccatcacctgcacagtctctggtttctcattaactacctatgctgtacactgggttcgccagtctccaggaaagggtctggagtggctgggagtgatatggagtggtggaatcacagactataatgcagctttcatatccagactgagcatcaccaaggacgattccaagagccaagttttctttaaaatgaacagtctgcaacctaatgacacagccatttattactgtgccagaaatgggggtgataactacccttattactatgctatggactactggggtcaaggaacctcagtcaccgtctcctctgatcacgtctgctccagggacttcaccccgcccaccgtgaagatcttacagtcgtcctgcgacggcggcgggcacttccccccgaccatccagctcctgtgcctcgtctctgggtacaccccagggactatcaacatcacctggctggaggacgggcaggtcatggacgtggacttgtccaccgcctctaccacgcaggagggtgagctggcctccacacaaagcgagctcaccctcagccagaagcactggctgtcagaccgcacctacacctgccaggtcacctatcaaggtcacacctttgaggacagcaccaagaagtgtgcagattccaacccgagaggggtgagcgcctacctaagccggcccagcccgttcgacctgttcatccgcaagtcgcccacgatcacctgtctggtggtggacctggcacccagcaaggggaccgtgaacctgacctggtcccgggccagtgggaagcctgtgaaccactccaccagaaaggaggagaagcagcgcaatggcacgttaaccgtcacgtccaccctgccggtgggcacccgagactggatcgagggggagacctaccagtgcagggtgacccacccccacctgcccagggccctcatgcggtccacgaccaagaccagcggcccgcgtgctgccccggaagtctatgcgtttgcgacgccggagtggccggggagccgggacaagcgcaccctcgcctgcctgatccagaacttcatgcctgaggacatctcggtgcagtggctgcacaacgaggtgcagctcccggacgcccggcacagcacgacgcagccccgcaagaccaagggctccggcttcttcgtcttcagccgcctggaggtgaccagggccgaatgggagcagaaagatgagttcatctgccgtgcagtccatgaggcagcgagcccctcacagaccgtccagcgagcggtgtctgtaaatcccggtaaagcggatccttcgaagctcccatcctgggccattaccttaatctcagtaaatggaatttttgtgatatgctgcctgacctactgctttgccccaagatgcagagagagaaggaggaatgagagattgagaagggaaagtgtacgccctgtataaatcgata

SEQ ID NO: 180 - protein, 648 aa, Homo sapiens [sequence omitted]

SEQ ID NO: 181 - DNA, 1736 bp, Artificial sequence
  Description of Artificial Sequence: Synthetic nucleotide sequence
aagcttatggattttcaagtgcagattttcagcttcctgctaatcagtgcttcagtcataatgtccagaggagtcgacattgtgctcacccaatctccagcttctttggctgtgtctctaggtcagagagccaccatctcctgcagagccagtgaaagtgttgaatattatgtcacaagtttaatgcagtggtaccaacagaaaccaggacagccacccaaactcctcatctctgctgcatccaacgtagaatctggggtccctgccaggtttagtggcagtgggtctgggacagacttcagcctcaacatccatcctgtggaggaggatgatattgcaatgtatttctgtcagcaaagtaggaaggttccttggacgttcggtggaggcaccaagctggaaatcaaacggggtggcggtggctcgggcggaggtgggtcgggtggcggcggatctcaggtgcagctgaaggagtcaggacctggcctggtggcgccctcacagagcctgtccatcacatgcaccgtctcagggttctcattaaccggctatggtgtaaactgggttcgccagcctccaggaaagggtctggagtggctgggaatgatatggggtgatggaagcacagactataattcagctctcaaatccagactgagcatcaccaaggacaactccaagagccaagttttcttaaaaatgaacagtctgcaaactgatgacacagccagatactactgtgccagagatggttatagtaactttcattactatgttatggactactggggtcaaggaacctcagtcaccgtctcctcagatcagccagttccctcaactccacctaccccatctccctcaactccacctaccccatctccctcatgctgccacccccgactgtcactgcaccgaccggccctcgaggacctgctcttaggttcagaagcgatcctcacgtgcacactgaccggcctgagagatgcctcaggtgtcaccttcacctggacgccctcaagtgggaagagcgctgttcaaggaccacctgaccgtgacctctgtggctgctacagcgtgtccagtgtcctgccgggctgtgccgagccatggaaccatgggaagaccttcacttgcactgctgcctaccccgagtccaagaccccgctaaccgccaccctctcaaaatccggaaacacattccggcccgaggtccacctgctgccgccgccgtcggaggagctggccctgaacgagctggtgacgctgacgtgcctggcacgtggcttcagccccaaggatgtgctggttcgctggctgcaggggtcacaggagctgccccgcgagaagtacctgacttgggcatcccggcaggagcccagccagggcaccaccaccttcgctgtgaccagcatactgcgcgtggcagccgaggactggaagaagggggacaccttctcctgcatggtgggccacgaggccctgccgctggccttcacacagaagaccatcgaccgcttggcgggtaaacccacccatgtcaatgtgtctgttgtcatggcggaggtggacgcggatccttcgaacaacctgctcccatcctgggccattaccttaatctcagtaaatggaatttttgtgatatgctgcctgacctactgctttgccccaagatgcagagagagaaggaggaatgagagattgagaagggaaagtgtacgccctgtataaatcgatac

SEQ ID NO: 182 - protein, 573 aa, Artificial sequence
  Description of Artificial Sequence: Synthetic amino acid sequence
MDFQVQIFSFLLISASVIMSRGVDIVLTQSPASLAVSLGQRATISCRASESVEYYVTSLMQWYQQKPGQPPKLLISAASNVESGVPARFSGSGSGTDFSLNIHPVEEDDIAMYFCQQSRKVPWTFGGGTKLEIKRGGGGSGGGGSGGGGSQVQLKESGPGLVAPSQSLSITCTVSGFSLTGYGVNWVRQPPGKGLEWLGMIWGDGSTDYNSALKSRLSITKDNSKSQVFLKMNSLQTDDTARYYCARDGYSNFHYYVMDYWGQGTSVTVSSDQPVPSTPPTPSPSTPPTPSPSCCHPRLSLHRPALEDLLLGSEAILTCTLTGLRDASGVTFTWTPSSGKSAVQGPPDRDLCGCYSVSSVLPGCAEPWNHGKTFTCTAAYPESKTPLTATLSKSGNTFRPEVHLLPPPSEELALNELVTLTCLARGFSPKDVLVRWLQGSQELPREKYLTWASRQEPSQGTTTFAVTSILRVAAEDWKKGDTFSCMVGHEALPLAFTQKTIDRLAGKPTHVNVSVVMAEVDADPSNNLLPSWAITLISVNGIFVICCLTYCFAPRCRERRRNERLRRESVRPV

SEQ ID NO: 183 - DNA, 1960 bp, Homo sapiens
aagcttatggattttcaagtgcagattttcagcttcctgctaatcagtgcttcagtcataatgtccagaggagtcgacattgtgctcacccaatctccagcttctttggctgtgtctctaggtcagagagccaccatctcctgcagagccagtgaaagtgttgaatattatgtcacaagtttaatgcagtggtaccaacagaaaccaggacagccacccaaactcctcatctctgctgcatccaacgtagaatctggggtccctgccaggtttagtggcagtgggtctgggacagacttcagcctcaacatccatcctgtggaggaggatgatattgcaatgtatttctgtcagcaaagtaggaaggttccttggacgttcggtggaggcaccaagctggaaatcaaacggggtggcggtggctcgggcggaggtgggtcgggtggcggcggatctcaggtgcagctgaaggagtcaggacctggcctggtggcgccctcacagagcctgtccatcacatgcaccgtctcagggttctcattaaccggctatggtgtaaactgggttcgccagcctccaggaaagggtctggagtggctgggaatgatatggggtgatggaagcacagactataattcagctctcaaatccagactgagcatcaccaaggacaactccaagagccaagttttcttaaaaatgaacagtctgcaaactgatgacacagccagatactactgtgccagagatggttatagtaactttcattactatgttatggactactggggtcaaggaacctcagtcaccgtctcctcagatcacgtctgctccagggacttcaccccgcccaccgtgaagatcttacagtcgtcctgcgacggcggcgggcacttccccccgaccatccagctcctgtgcctcgtctctgggtacaccccagggactatcaacatcacctggctggaggacgggcaggtcatggacgtggacttgtccaccgcctctaccacgcaggagggtgagctggcctccacacaaagcgagctcaccctcagccagaagcactggctgtcagaccgcacctacacctgccaggtcacctatcaaggtcacacctttgaggacagcaccaagaagtgtgcagattccaacccgagaggggtgagcgcctacctaagccggcccagcccgttcgacctgttcatccgcaagtcgcccacgatcacctgtctggtggtggacctggcacccagcaaggggaccgtgaacctgacctggtcccgggccagtgggaagcctgtgaaccactccaccagaaaggaggagaagcagcgcaatggcacgttaaccgtcacgtccaccctgccggtgggcacccgagactggatcgagggggagacctaccagtgcagggtgacccacccccacctgcccagggccctcatgcggtccacgaccaagaccagcggcccgcgtgctgccccggaagtctatgcgtttgcgacgccggagtggccggggagccgggacaagcgcaccctcgcctgcctgatccagaacttcatgcctgaggacatctcggtgcagtggctgcacaacgaggtgcagctcccggacgcccggcacagcacgacgcagccccgcaagaccaagggctccggcttcttcgtcttcagccgcctggaggtgaccagggccgaatgggagcagaaagatgagttcatctgccgtgcagtccatgaggcagcgagcccctcacagaccgtccagcgagcggtgtctgtaaatcccggtaaagcggatccttcgaagctcccatcctgggccattaccttaatctcagtaaatggaatttttgtgatatgctgcctgacctactgctttgccccaagatgcagagagagaaggaggaatgagagattgagaagggaaagtgtacgccctgtataaatcgata

SEQ ID NO: 184 - protein, 648 aa, Homo sapiens
MDFQVQIFSFLLISASVIMSRGVDIVLTQSPASLAVSLGQRATISCRASESVEYYVTSLMQWYQQKPGQPPKLLISAASNVESGVPARFSGSGSGTDFSLNIHPVEEDDIAMYFCQQSRKVPWTFGGGTKLEIKRGGGGSGGGGSGGGGSQVQLKESGPGLVAPSQSLSITCTVSGFSLTGYGVNWVRQPPGKGLEWLGMIWGDGSTDYNSALKSRLSITKDNSKSQVFLKMNSLQTDDTARYYCARDGYSNFHYYVMDYWGQGTSVTVSSDHVCSRDFTPPTVKILQSSCDGGGHFPPTIQLLCLVSGYTPGTINITWLEDGQVMDVDLSTASTTQEGELASTQSELTLSQKHWLSDRTYTCQVTYQGHTFEDSTKKCADSNPRGVSAYLSRPSPFDLFIRKSPTITCLVVDLAPSKGTVNLTWSRASGKPVNHSTRKEEKQRNGTLTVTSTLPVGTRDWIEGETYQCRVTHPHLPRALMRSTTKTSGPRAAPEVYAFATPEWPGSRDKRTLACLIQNFMPEDISVQWLHNEVQLPDARHSTTQPRKTKGSGFFVFSRLEVTRAEWEQKDEFICRAVHEAASPSQTVQRAVSVNPGKADPSKLPSWAITLISVNGIFVICCLTYCFAPRCRERRRNERLRRESVRPV

SEQ ID NO: 185 - DNA, 793 bp, Artificial sequence
  Description of Artificial Sequence: Synthetic nucleotide sequence
atgttgtatacatctcagctccttgggcttttactcttctggatttcagcctccagaagtgacatagtgctgactcagactccagccactctgtctctaattcctggagaaagagtcacaatgacctgtaagaccagtcagaatattggcacaatcttacactggtatcaccaaaaaccaaaggaggctccaagggctctcatcaagtatgcttcgcagtccattcctgggatcccctccagattcagtggcagtggttcggaaacagatttcactctcagcatcaataacctggagcctgatgatatcggaatttattactgtcaacaaagtagaagctggcctgtcacgttcggtcctggcaccaagctggagataaaacggggtggcggtggctcgggcggaggtgggtcgggtggcggcggatctcaggtcaagctgcagcagtccggttctgaactagggaaacctggggcctcagtgaaactgtcctgcaagacttcaggctacatattcacagatcactatatttcttgggtgaaacagaagcctggagaaagcctgcagtggataggaaatgtttatggtggaaatggtggtacaagctacaatcaaaaattccagggcaaggccacactgactgtagataaaatctctagcacagcctacatggaactcagcagcctgacatctgaggattctgccatctattactgtgcaagaaggccggtagcgacgggccatgctatggactactggggtcaggggatccaagttaccgtctcctctgatc

SEQ ID NO: 186 - protein, 264 aa, Artificial sequence
  Description of Artificial Sequence: Synthetic amino acid sequence
MLYTSQLLGLLLFWISASRSDIVLTQTPATLSLIPGERVTMTCKTSQNIGTILHWYHQKPKEAPRALIKYASQSIPGIPSRFSGSGSETDFTLSINNLEPDDIGIYYCQQSRSWPVTFGPGTKLEIKRGGGGSGGGGSGGGGSQVKLQQSGSELGKPGASVKLSCKTSGYIFTDHYISWVKQKPGESLQWIGNVYGGNGGTSYNQKFQGKATLTVDKISSTAYMELSSLTSEDSAIYYCARRPVATGHAMDYWGQGIQVTVSSD

SEQ ID NO: 187 - DNA, 47 bp, Artificial sequence
  Description of Artificial Sequence: Synthetic oligonucleotide
gttgttttcgaaggatccgctttacccggagacagggagaggctctt

SEQ ID NO: 188 - DNA, 45 bp, Artificial sequence
  Description of Artificial Sequence: Synthetic oligonucleotide
gttgttagatctggagcccaaatcttgtgacaaaactcacacatg

SEQ ID NO: 189 - DNA, 48 bp, Artificial sequence
  Description of Artificial Sequence: Synthetic oligonucleotide
gttgtggatccttcgaacccgttcctggtgctgctgcactcggtgtcg

SEQ ID NO: 190 - DNA, 48 bp, Artificial sequence
  Description of Artificial Sequence: Synthetic oligonucleotide
gttgttatcgatctcgagttatcaggacgcttcggaggtagatgcgtc

SEQ ID NO: 191 - DNA, 657 bp, Artificial sequence
  Description of Artificial Sequence: Synthetic nucleotide sequence
gtggatccttcgaacccgttcctggtgctgctgcactcggtgtcgtccagcctgtcgagcagcgagctgaccgagctcaagttcctatgcctcgggcgcgtgggcaagcgcaagctggagcgcgtgcagagcggcctagacctcttctccatgctgctggagcagaacgacctggagcccgggcacaccgagctcctgcgcgagctgctcgcctccctgcggcgccacgacctgctgcggcgcgtcgacgacttcgaggcgggggcggcggccggggccgcgcctggggaagaagacctgtgtgcagcatttaacgtcatatgtgataatgtggggaaagattggagaaggctggctcgtcagctcaaagtctcagacaccaagatcgacagcatcgaggacagatacccccgcaacctgacagagcgtgtgcgggagtcactgagaatctggaagaacacagagaaggagaacgcaacagtggcccacctggtgggggctctcaggtcctgccagatgaacctggtggctgacctggtacaagaggttcagcaggcccgtgacctccagaacaggagtggggccatgtccccgatgtcatggaactcagacgcatctacctccgaagcgtcctgataactcgagatcgataacaac

SEQ ID NO: 192 - protein, 211 aa, Artificial sequence
  Description of Artificial Sequence: Synthetic amino acid sequence
VDPSNPFLVLLHSVSSSLSSSELTELKFLCLGRVGKRKLERVQSGLDLFSMLLEQNDLEPGHTELLRELLASLRRHDLLRRVDDFEAGAAAGAAPGEEDLCAAFNVICDNVGKDWRRLARQLKVSDTKIDSIEDRYPRNLTERVRESLRIWKNTEKENATVAHLVGALRSCQMNLVADLVQEVQQARDLQNRSGAMSPMSWNSDASTSEAS

SEQ ID NO: 193 - DNA, 60 bp, Artificial sequence
  Description of Artificial Sequence: Synthetic primer
gttgtggatcctcccttttgggtgctggtggtggttggtgtcctggcttgctatagcttg

SEQ ID NO: 194 - DNA, 60 bp, Artificial sequence
  Description of Artificial Sequence: Synthetic primer
gttgtttcgaacccagaaaataataaaggccactgttactagcaagctatagcaagccag

SEQ ID NO: 195 - DNA, 32 bp, Artificial sequence
  Description of Artificial Sequence: Synthetic primer
gttgtggatcctcccttttgggtgctggtggt

SEQ ID NO: 196 - DNA, 33 bp, Artificial sequence
  Description of Artificial Sequence: Synthetic primer
gttgtttcgaacccagaaaataataaaggccac

SEQ ID NO: 197 - DNA, 28 bp, Artificial sequence
  Description of Artificial Sequence: Synthetic primer
gttgtggatcctcctgctcccatcctgg

SEQ ID NO: 198 - DNA, 32 bp, Artificial sequence
  Description of Artificial Sequence: Synthetic primer
gttgtttcgaacggcaaagcagtaggtcaggc

SEQ ID NO: 199 - DNA, 45 bp, Artificial sequence
  Description of Artificial Sequence: Synthetic primer
gttgtggatccttcgaacccattcctggtgctgctgcactcgctg

SEQ ID NO: 200 - DNA, 42 bp, Artificial sequence
  Description of Artificial Sequence: Synthetic primer
gttgttatcgatctcgagtcagggtgtttctgaggaagacac

SEQ ID NO: 201 - DNA, 645 bp, Mus sp.
gtggatccttcgaacatggacccattcctggtgctgctgcactcgctgtccggcagcctgtcgggcaacgatctgatggagctcaagttcttgtgccgcgagcgcgtgagcaaacgaaagctggagcgcgtgcagagtggcctggacctgttcacggtgctgctggagcagaacgacctggagcgcgggcacaccgggctgctgcgcgagttgctggcctcgctgcgccgacacgatctactgcagcgcctggacgacttcgaggcggggacggcgaccgctgcgcccccgggggaggcagatctgcaggtggcatttgacattgtgtgtgacaatgtggggagagactggaaaagactggcccgcgagctgaaggtgtctgaggccaagatggatgggattgaggagaagtacccccgaagtctgagtgagcgggtaagggagagtctgaaagtctggaagaatgctgagaagaagaacgcctcggtggccggactggtcaaggcgctgcggacctgcaggctgaatctggtggctgacctggtggaagaagcccaggaatctgtgagcaagagtgagaatatgtccccagtactaagggattcaactgtgtcttcctcagaaacaccctgactcgagatcgat

SEQ ID NO: 202 - protein, 210 aa, Mus sp.
VDPSNMDPFLVLLHSLSGSLSGNDLMELKFLCRERVSKRKLERVQSGLDLFTVLLEQNDLERGHTGLLRELLASLRRHDLLQRLDDFEAGTATAAPPGEADLQVAFDIVCDNVGRDWKRLARELKVSEAKMDGIEEKYPRSLSERVRESLKVWKNAEKKNASVAGLVKALRTCRLNLVADLVEEAQESVSKSENMSPVLRDSTVSSSETP

SEQ ID NO: 203 - DNA, 48 bp, Mus sp.
gttgtggatccttcgaacatggagaacaacaaaacctcagtggattca

SEQ ID NO: 204 - DNA, 45 bp, Mus sp.
gttgttatcgatctcgagctagtgataaaagtacagttctttcgt

SEQ ID NO: 205 - DNA, 46 bp, Mus sp.
gttgtttcgaacatggatttccagagttgtctttatgctattgctg

SEQ ID NO: 206 - DNA, 48 bp, Mus sp.
gttgttatcgatctcgagtcattagggagggaagaagagcttcttccg

SEQ ID NO: 207 - DNA, 45 bp, Homo sapiens
gttgtggatccttcgaacatggagaacactgaaaactcagtggat

SEQ ID NO: 208 - DNA, 48 bp, Homo sapiens
gttgttatcgatctcgagttagtgataaaaatagagttcttttgtgag

SEQ ID NO: 209 - DNA, 45 bp, Homo sapiens
gttgtggatccttcgaacatggacttcagcagaaatctttatgat

SEQ ID NO: 210 - DNA, 48 bp, Homo sapiens
gttgttatcgatgcatgctcaatcagaagggaagacaagtttttttct

SEQ ID NO: 211 - DNA, 816 bp, Artificial sequence
  Description of Artificial Sequence: Synthetic nucleotide sequence
  modified_base (475)..(477): nucleotide codon can be tcn, acn, gan, can, aan, cgn or agn; n is a, c, g, other or unknown
aagcttgccgccatggattttcaagtgcagattttcagcttcctgctaatcagtgcttcagtcataattgccagaggacaaattgttctctcccagtctccagcaatcctgtctgcatctccaggggagaaggtcacaatgacttgcagggccagctcaagtgtaagttacatgcactggtaccagcagaagccaggatcctcccccaaaccctggatttatgccccatccaacctggcttctggagtccctgctcgcttcagtggcagtgggtctgggacctcttactctctcacaatcagcagagtggaggctgaagatgctgccacttattactgccagcagtggagttttaacccacccacgttcggtgctgggaccaagctggagctgaaagatggcggtggctcgggcggtggtggatctggaggaggtgggagctctcaggcttatctacagcagtctggggctgagnnngtgaggcctggggcctcagtgaagatgtcctgcaaggcttctggctacacatttaccagttacaatatgcactgggtaaagcagacacctagacagggcctggaatggattggagctatttatccaggaaatggtgatacttcctacaatcagaagttcaagggcaaggccacactgactgtagacaaatcctccagcacagcctacatgcagctcagcagcctgacatctgaagactctgcggtctatttctgtgcaagagtggtgtactatagtaactcttactggtacttcgatgtctggggcacagggaccacggtcaccgtctcttctgatcag

SEQ ID NO: 212 - protein, 268 aa, Artificial sequence
  Description of Artificial Sequence: Synthetic amino acid sequence
  MOD_RES (155)..(155): Xaa can be Ser, Thr, Asp, Glu, Gln, Asn, Arg, Lys or His
MDFQVQIFSFLLISASVIIARGQIVLSQSPAILSASPGEKVTMTCRASSSVSYMHWYQQKPGSSPKPWIYAPSNLASGVPARFSGSGSGTSYSLTISRVEAEDAATYYCQQWSFNPPTFGAGTKLELKDGGGSGGGGSGGGGSSQAYLQQSGAEXVRPGASVKMSCKASGYTFTSYNMHWVKQTPRQGLEWIGAIYPGNGDTSYNQKFKGKATLTVDKSSSTAYMQLSSLTSEDSAVYFCARVVYYSNSYWYFDVWGTGTTVTVSSDQ

SEQ ID NO: 213 - DNA, 813 bp, Artificial sequence
  Description of Artificial Sequence: Synthetic nucleotide sequence
aagcttgccgccatggattttcaagtgcagattttcagcttcctgctaatcagtgcttcagtcataattgccagaggacaaattgttctctcccagtctccagcaatcctgtctgcatctccaggggagaaggtcacaatgacttgcagggccagctcaagtgtaagttacatgcactggtaccagcagaagccaggatcctcccccaaaccctggatttatgccccatccaacctggcttctggagtccctgctcgcttcagtggcagtgggtctgggacctcttactctctcacaatcagcagagtggaggctgaagatgctgccacttattactgccagcagtggagttttaacccacccacgttcggtgctgggaccaagctggagctgaaagatggcggtggctcgggcggtggtggatctggaggaggtgggagctctcaggcttatctacagcagtctggggctgaggtgaggcctggggcctcagtgaagatgtcctgcaaggcttctggctacacatttaccagttacaatatgcactgggtaaagcagacacctagacagggcctggaatggattggagctatttatccaggaaatggtgatacttcctacaatcagaagttcaagggcaaggccacactgactgtagacaaatcctccagcacagcctacatgcagctcagcagcctgacatctgaagactctgcggtctatttctgtgcaagagtggtgtactatagtaactcttactggtacttcgatgtctggggcacagggaccacggtcaccgtctcttctgatcag

SEQ ID NO: 214 - protein, 267 aa, Artificial sequence
  Description of Artificial Sequence: Synthetic amino acid sequence
MDFQVQIFSFLLISASVIIARGQIVLSQSPAILSASPGEKVTMTCRASSSVSYMHWYQQKPGSSPKPWIYAPSNLASGVPARFSGSGSGTSYSLTISRVEAEDAATYYCQQWSFNPPTFGAGTKLELKDGGGSGGGGSGGGGSSQAYLQQSGAEVRPGASVKMSCKASGYTFTSYNMHWVKQTPRQGLEWIGAIYPGNGDTSYNQKFKGKATLTVDKSSSTAYMQLSSLTSEDSAVYFCARVVYYSNSYWYFDVWGTGTTVTVSSDQ

SEQ ID NO: 215 - DNA, 443 bp, Artificial sequence
  Description of Artificial Sequence: Synthetic nucleotide sequence
  modified_base (391)..(393): nucleotide codon can be tcn, agn, aan, cgn, can, gan and non-natural derivatives of these codons; n is a, c, g, t, other or unknown
aagcttgccgccatggattttcaagtgcagattttcagcttcctgctaatcagtgcttcagtcataattgccagaggacaaattgttctctcccagtctccagcaatcctgtctgcatctccaggggagaaggtcacaatgacttgcagggccagctcaagtgtaagttacatgcactggtaccagcagaagccaggatcctcccccaaaccctggatttatgccccatccaacctggcttctggagtccctgctcgcttcagtggcagtgggtctgggacctcttactctctcacaatcagcagagtggaggctgaagatgctgccacttattactgccagcagtggagttttaacccacccacgttcggtgctgggaccaagctggagnnnaaagatggcggtggctcgggcggtggtggatctggaggaggtgggagctc

SEQ ID NO: 216 - protein, 144 aa, Artificial sequence
  Description of Artificial Sequence: Synthetic amino acid sequence
  MOD_RES (127)..(127): Xaa is Ser, Thr, Arg, Lys, His, Gln, Asn, Asp, Glu, or non-natural derivatives of these amino acids
MDFQVQIFSFLLISASVIIARGQIVLSQSPAILSASPGEKVTMTCRASSSVSYMHWYQQKPGSSPKPWIYAPSNLASGVPARFSGSGSGTSYSLTISRVEAEDAATYYCQQWSFNPPTFGAGTKLEXKDGGGSGGGGSGGGGSS

SEQ ID NO: 217 - DNA, 440 bp, Artificial sequence
  Description of Artificial Sequence: Synthetic nucleotide sequence
aagcttgccgccatggattttcaagtgcagattttcagcttcctgctaatcagtgcttcagtcataattgccagaggacaaattgttctctcccagtctccagcaatcctgtctgcatctccaggggagaaggtcacaatgacttgcagggccagctcaagtgtaagttacatgcactggtaccagcagaagccaggatcctcccccaaaccctggatttatgccccatccaacctggcttctggagtccctgctcgcttcagtggcagtgggtctgggacctcttactctctcacaatcagcagagtggaggctgaagatgctgccacttattactgccagcagtggagttttaacccacccacgttcggtgctgggaccaagctggagaaagatggcggtggctcgggcggtggtggatctggaggaggtgggagctc

SEQ ID NO: 218 - protein, 143 aa, Artificial sequence
  Description of Artificial Sequence: Synthetic amino acid sequence
MDFQVQIFSFLLISASVIIARGQIVLSQSPAILSASPGEKVTMTCRASSSVSYMHWYQQKPGSSPKPWIYAPSNLASGVPARFSGSGSGTSYSLTISRVEAEDAATYYCQQWSFNPPTFGAGTKLEKDGGGSGGGGSGGGGSS

SEQ ID NO: 219 - DNA, 664 bp, Artificial sequence
  Description of Artificial Sequence: Synthetic nucleotide sequence
tccaacccgagaggggtgagcgcctacctaagccggcccagcccgttcgacctgttcatccgcaagtcgcccacgatcacctgtctggtggtggacctggcacccagcaaggggaccgtgaacctgacctggtcccgggccagtgggaagcctgtgaaccactccaccagaaaggaggagaagcagcgcaatggcacgttaaccgtcacgtccaccctgccggtgggcacccgagactggatcgagggggagacctaccagtgcagggtgacccacccccacctgcccagggccctcatgcggtccacgaccaagaccagcggcccgcgtgctgccccggaagtctatgcgtttgcgacgccggagtggccggggagccgggacaagcgcaccctcgcctgcctgatccagaacttcatgcctgaggacatctcggtgcagtggctgcacaacgaggtgcagctcccggacgcccggcacagcacgacgcagccccgcaagaccaagggctccggcttcttcgtcttcagccgcctggaggtgaccagggccgaatgggagcagaaagatgagttcatctgccgtgcagtccatgaggcagcgagcccctcacagaccgtccagcgagcggtgtctgtaaatcccggtaaatgataatctagaa

SEQ ID NO: 220 - protein, 217 aa, Artificial sequence
  Description of Artificial Sequence: Synthetic amino acid sequence
SNPRGVSAYLSRPSPFDLFIRKSPTITCLVVDLAPSKGTVNLTWSRASGKPVNHSTRKEEKQRNGTLTVTSTLPVGTRDWIEGETYQCRVTHPHLPRALMRSTTKTSGPRAAPEVYAFATPEWPGSRDKRTLACLIQNFMPEDISVQWLHNEVQLPDARHSTTQPRKTKGSGFFVFSRLEVTRAEWEQKDEFICRAVHEAASPSQTVQRAVSVNPGK

SEQ ID NO: 221 - DNA, 719 bp, Artificial sequence
  Description of Artificial Sequence: Synthetic nucleotide sequence
tgatcaggagcccaaatcttctgacaaaactcacacatccccaccgtccccagcatccaacccgagaggggtgagcgcctacctaagccggcccagcccgttcgacctgttcatccgcaagtcgcccacgatcacctgtctggtggtggacctggcacccagcaaggggaccgtgaacctgacctggtcccgggccagtgggaagcctgtgaaccactccaccagaaaggaggagaagcagcgcaatggcacgttaaccgtcacgtccaccctgccggtgggcacccgagactggatcgagggggagacctaccagtgcagggtgacccacccccacctgcccagggccctcatgcggtccacgaccaagaccagcggcccgcgtgctgccccggaagtctatgcgtttgcgacgccggagtggccggggagccgggacaagcgcaccctcgcctgcctgatccagaacttcatgcctgaggacatctcggtgcagtggctgcacaacgaggtgcagctcccggacgcccggcacagcacgacgcagccccgcaagaccaagggctccggcttcttcgtcttcagccgcctggaggtgaccagggccgaatgggagcagaaagatgagttcatctgccgtgcagtccatgaggcagcgagcccctcacagaccgtccagcgagcggtgtctgtaaatcccggtaaatgataatctagaa

SEQ ID NO: 222 - protein, 235 aa, Artificial sequence
  Description of Artificial Sequence: Synthetic amino acid sequence
DQEPKSSDKTHTSPPSPASNPRGVSAYLSRPSPFDLFIRKSPTITCLVVDLAPSKGTVNLTWSRASGKPVNHSTRKEEKQRNGTLTVTSTLPVGTRDWIEGETYQCRVTHPHLPRALMRSTTKTSGPRAAPEVYAFATPEWPGSRDKRTLACLIQNFMPEDISVQWLHNEVQLPDARHSTTQPRKTKGSGFFVFSRLEVTRAEWEQKDEFICRAVHEAASPSQTVQRAVSVNPGK

SEQ ID NO: 223 - DNA, 994 bp, Artificial sequence
  Description of Artificial Sequence: Synthetic nucleotide sequence
tgatcacgtctgctccagggacttcaccccgcccaccgtgaagatcttacagtcgtcctgcgacggcggcgggcacttccccccgaccatccagctcctgtgcctcgtctctgggtacaccccagggactatcaacatcacctggctggaggacgggcaggtcatggacgtggacttgtccaccgcctctaccacgcaggagggtgagctggcctccacacaaagcgagctcaccctcagccagaagcactggctgtcagaccgcacctacacctgccaggtcacctatcaaggtcacacctttgaggacagcaccaagaagtgtgcagattccaacccgagaggggtgagcgcctacctaagccggcccagcccgttcgacctgttcatccgcaagtcgcccacgatcacctgtctggtggtggacctggcacccagcaaggggaccgtgaacctgacctggtcccgggccagtgggaagcctgtgaaccactccaccagaaaggaggagaagcagcgcaatggcacgttaaccgtcacgtccaccctgccggtgggcacccgagactggatcgagggggagacctaccagtgcagggtgacccacccccacctgcccagggccctcatgcggtccacgaccaagaccagcggcccgcgtgctgccccggaagtctatgcgtttgcgacgccggagtggccggggagccgggacaagcgcaccctcgcctgcctgatccagaacttcatgcctgaggacatctcggtgcagtggctgcacaacgaggtgcagctcccggacgcccggcacagcacgacgcagccccgcaagaccaagggctccggcttcttcgtcttcagccgcctggaggtgaccagggccgaatgggagcagaaagatgagttcatctgccgtgcagtccatgaggcagcgagcccctcacagaccgtccagcgagcggtgtctgtaaatcccggtaaatgataatctaga

SEQ ID NO: 224 - protein, 327 aa, Artificial sequence
  Description of Artificial Sequence: Synthetic amino acid sequence
DHVCSRDFTPPTVKILQSSCDGGGHFPPTIQLLCLVSGYTPGTINITWLEDGQVMDVDLSTASTTQEGELASTQSELTLSQKHWLSDRTYTCQVTYQGHTFEDSTKKCADSNPRGVSAYLSRPSPFDLFIRKSPTITCLVVDLAPSKGTVNLTWSRASGKPVNHSTRKEEKQRNGTLTVTSTLPVGTRDWIEGETYQCRVTHPHLPRALMRSTTKTSGPRAAPEVYAFATPEWPGSRDKRTLACLIQNFMPEDISVQWLHNEVQLPDARHSTTQPRKTKGSGFFVFSRLEVTRAEWEQKDEFICRAVHEAASPSQTVQRAVSVNPGK

SEQ ID NO: 225 - DNA, 720 bp, Artificial sequence
  Description of Artificial Sequence: Synthetic nucleotide sequence
tgatcaggagcccaaatcttctgacaaaactcacacatccccaccgtccccagcatccaacccgagaggggtgagcgcctacctaagccggcccagcccgttcgacctgttcatccgcaagtcgcccacgatcacctgtctggtggtggacctggcacccagcaaggggaccgtgaacctgacctggtcccgggccagtgggaagcctgtgaaccactccaccagaaaggaggagaagcagcgcaatggcacgttaaccgtcacgtccaccctgccggtgggcacccgagactggatcgagggggagacctaccagtgcagggtgacccacccccacctgcccagggccctcatgcggtccacgaccaagaccagcggcccgcgtgctgccccggaagtctatgcgtttgcgacgccggagtggccggggagccgggacaagcgcaccctcgcctgcctgatccagaacttcatgcctgaggacatctcggtgcagtggctgcacaacgaggtgcagctcccggacgcccggcacagcacgacgcagccccgcaagaccaagggctccggcttcttcgtcttcagccgcctggaggtgaccagggccgaatgggagcagaaagatgagttcatctgccgtgcagtccatgaggcagcgagcccctcacagaccgtccagcgagcggtgtctgtaaatcccggtaaagcggatccttcgaa

SEQ ID NO: 226 - protein, 240 aa, Artificial sequence
  Description of Artificial Sequence: Synthetic amino acid sequence
DQEPKSSDKTHTSPPSPASNPRGVSAYLSRPSPFDLFIRKSPTITCLVVDLAPSKGTVNLTWSRASGKPVNHSTRKEEKQRNGTLTVTSTLPVGTRDWIEGETYQCRVTHPHLPRALMRSTTKTSGPRAAPEVYAFATPEWPGSRDKRTLACLIQNFMPEDISVQWLHNEVQLPDARHSTTQPRKTKGSGFFVFSRLEVTRAEWEQKDEFICRAVHEAASPSQTVQRAVSVNPGKSGSFE

SEQ ID NO: 227 - DNA, 1527 bp, Artificial sequence
  Description of Artificial Sequence: Synthetic nucleotide sequence
aagcttgccgccatggattttcaagtgcagattttcagcttcctgctaatcagtgcttcagtcataattgccagaggacaaattgttctctcccagtctccagcaatcctgtctgcatctccaggggagaaggtcacaatgacttgcagggccagctcaagtgtaagttacatgcactggtaccagcagaagccaggatcctcccccaaaccctggatttatgccccatccaacctggcttctggagtccctgctcgcttcagtggcagtgggtctgggacctcttactctctcacaatcagcagagtggaggctgaagatgctgccacttattactgccagcagtggagttttaacccacccacgttcggtgctgggaccaagctggagctgaaagatggcggtggctcgggcggtggtggatctggaggaggtgggagctctcaggcttatctacagcagtctggggctgagtcggtgaggcctggggcctcagtgaagatgtcctgcaaggcttctggctacacatttaccagttacaatatgcactgggtaaagcagacacctagacagggcctggaatggattggagctatttatccaggaaatggtgatacttcctacaatcagaagttcaagggcaaggccacactgactgtagacaaatcctccagcacagcctacatgcagctcagcagcctgacatctgaagactctgcggtctatttctgtgcaagagtggtgtactatagtaactcttactggtacttcgatgtctggggcacagggaccacggtcaccgtctcttctgatcaggagcccaaatcttctgacaaaactcacacatccccaccgtcctcagcatccaacccgagaggggtgagcgcctacctaagccggcccagcccgttcgacctgttcatccgcaagtcgcccacgatcacctgtctggtggtggacctggcacccagcaaggggaccgtgaacctgacctggtcccgggccagtgggaagcctgtgaaccactccaccagaaaggaggagaagcagcgcaatggcacgttaaccgtcacgtccaccctgccggtgggcacccgagactggatcgagggggagacctaccagtgcagggtgacccacccccacctgcccagggccctcatgcggtccacgaccaagaccagcggcccgcgtgctgccccggaagtctatgcgtttgcgacgccggagtggccggggagccgggacaagcgcaccctcgcctgcctgatccagaacttcatgcctgaggacatctcggtgcagtggctgcacaacgaggtgcagctcccggacgcccggcacagcacgacgcagccccgcaagaccaagggctccggcttcttcgtcttcagccgcctggaggtgaccagggccgaatgggagcagaaagatgagttcatctgccgtgcagtccatgaggcagcgagcccctcacagaccgtccagcgagcggtgtctgtaaatcccggtaaatgataatctaga

SEQ ID NO: 228 - protein, 501 aa, Artificial sequence
  Description of Artificial Sequence: Synthetic amino acid sequence
MDFQVQIFSFLLISASVIIARGQIVLSQSPAILSASPGEKVTMTCRASSSVSYMHWYQQKPGSSPKPWIYAPSNLASGVPARFSGSGSGTSYSLTISRVEAEDAATYYCQQWSFNPPTFGAGTKLELKDGGGSGGGGSGGGGSSQAYLQQSGAESVRPGASVKMSCKASGYTFTSYNMHWVKQTPRQGLEWIGAIYPGNGDTSYNQKFKGKATLTVDKSSSTAYMQLSSLTSEDSAVYFCARVVYYSNSYWYFDVWGTGTTVTVSSDQEPKSSDKTHTSPPSSASNPRGVSAYLSRPSPFDLFIRKSPTITCLVVDLAPSKGTVNLTWSRASGKPVNHSTRKEEKQRNGTLTVTSTLPVGTRDWIEGETYQCRVTHPHLPRALMRSTTKTSGPRAAPEVYAFATPEWPGSRDKRTLACLIQNFMPEDISVQWLHNEVQLPDARHSTTQPRKTKGSGFFVFSRLEVTRAEWEQKDEFICRAVHEAASPSQTVQRAVSVNPGK

SEQ ID NO: 229 - DNA, 1527 bp, Artificial sequence
  Description of Artificial Sequence: Synthetic nucleotide sequence
aagcttgccgccatggattttcaagtgcagattttcagcttcctgctaatcagtgcttcagtcataattgccagaggacaaattgttctctcccagtctccagcaatcctgtctgcatctccaggggagaaggtcacaatgacttgcagggccagctcaagtgtaagttacatgcactggtaccagcagaagccaggatcctcccccaaaccctggatttatgccccatccaacctggcttctggagtccctgctcgcttcagtggcagtgggtctgggacctcttactctctcacaatcagcagagtggaggctgaagatgctgccacttattactgccagcagtggagttttaacccacccacgttcggtgctgggaccaagctggagctgaaagatggcggtggctcgggcggtggtggatctggaggaggtgggagctctcaggcttatctacagcagtctggggctgagtcggtgaggcctggggcctcagtgaagatgtcctgcaaggcttctggctacacatttaccagttacaatatgcactgggtaaagcagacacctagacagggcctggaatggattggagctatttatccaggaaatggtgatacttcctacaatcagaagttcaagggcaaggccacactgactgtagacaaatcctccagcacagcctacatgcagctcagcagcctgacatctgaagactctgcggtctatttctgtgcaagagtggtgtactatagtaactcttactggtacttcgatgtctggggcacagggaccacggtcaccgtctcttctgatcaggagcccaaatcttctgacaaaactcacacatccccaccgtccccagcatccaacccgagaggggtgagcgcctacctaagccggcccagcccgttcgacctgttcatccgcaagtcgcccacgatcacctgtctggtggtggacctggcacccagcaaggggaccgtgaacctgacctggtcccgggccagtgggaagcctgtgaaccactccaccagaaaggaggagaagcagcgcaatggcacgttaaccgtcacgtccaccctgccggtgggcacccgagactggatcgagggggagacctaccagtgcagggtgacccacccccacctgcccagggccctcatgcggtccacgaccaagaccagcggcccgcgtgctgccccggaagtctatgcgtttgcgacgccggagtggccggggagccgggacaagcgcaccctcgcctgcctgatccagaacttcatgcctgaggacatctcggtgcagtggctgcacaacgaggtgcagctcccggacgcccggcacagcacgacgcagccccgcaagaccaagggctccggcttcttcgtcttcagccgcctggaggtgaccagggccgaatgggagcagaaagatgagttcatctgccgtgcagtccatgaggcagcgagcccctcacagaccgtccagcgagcggtgtctgtaaatcccggtaaatgataatctaga

SEQ ID NO: 230 - protein, 501 aa, Artificial sequence
  Description of Artificial Sequence: Synthetic amino acid sequence
MDFQVQIFSFLLISASVIIARGQIVLSQSPAILSASPGEKVTMTCRASSSVSYMHWYQQKPGSSPKPWIYAPSNLASGVPARFSGSGSGTSYSLTISRVEAEDAATYYCQQWSFNPPTFGAGTKLELKDGGGSGGGGSGGGGSSQAYLQQSGAESVRPGASVKMSCKASGYTFTSYNMHWVKQTPRQGLEWIGAIYPGNGDTSYNQKFKGKATLTVDKSSSTAYMQLSSLTSEDSAVYFCARVVYYSNSYWYFDVWGTGTTVTVSSDQEPKSSDKTHTSPPSPASNPRGVSAYLSRPSPFDLFIRKSPTITCLVVDLAPSKGTVNLTWSRASGKPVNHSTRKEEKQRNGTLTVTSTLPVGTRDWIEGETYQCRVTHPHLPRALMRSTTKTSGPRAAPEVYAFATPEWPGSRDKRTLACLIQNFMPEDISVQWLHNEVQLPDARHSTTQPRKTKGSGFFVFSRLEVTRAEWEQKDEFICRAVHEAASPSQTVQRAVSVNPGK

SEQ ID NO: 231 - DNA, 443 bp, Artificial sequence
  Description of Artificial Sequence: Synthetic nucleotide sequence
aagcttgccgccatggattttcaagtgcagattttcagcttcctgctaatcagtgcttcagtcataattgccagaggacaaattgttctctcccagtctccagcaatcctgtctgcatctccaggggagaaggtcacaatgacttgcagggccagctcaagtgtaagttacatgcactggtaccagcagaagccaggatcctcccccaaaccctggatttatgccccatccaacctggcttctggagtccctgctcgcttcagtggcagtgggtctgggacctcttactctctcacaatcagcagagtggaggctgaagatgctgccacttattactgccagcagtggagttttaacccacccacgttcggtgctgggaccaagctggagctgaaagatggcggtggctcgggcggtggtggatctggaggaggtgggagctc

SEQ ID NO: 232 - protein, 144 aa, Artificial sequence
  Description of Artificial Sequence: Synthetic amino acid sequence
MDFQVQIFSFLLISASVIIARGQIVLSQSPAILSASPGEKVTMTCRASSSVSYMHWYQQKPGSSPKPWIYAPSNLASGVPARFSGSGSGTSYSLTISRVEAEDAATYYCQQWSFNPPTFGAGTKLESKDGGGSGGGGSGGGGSS

SEQ ID NO: 233 - DNA, 816 bp, Artificial sequence
  Description of Artificial Sequence: Synthetic nucleotide sequence
aagcttgccgccatggattttcaagtgcagattttcagcttcctgctaatcagtgcttcagtcataattgccagaggacaaattgttctctcccagtctccagcaatcctgtctgcatctccaggggagaaggtcacaatgacttgcagggccagctcaagtgtaagttacatgcactggtaccagcagaagccaggatcctcccccaaaccctggatttatgccccatccaacctggcttctggagtccctgctcgcttcagtggcagtgggtctgggacctcttactctctcacaatcagcagagtggaggctgaagatgctgccacttattactgccagcagtggagttttaacccacccacgttcggtgctgggaccaagctggagtctaaagatggcggtggctcgggcggtggtggatctggaggaggtgggagctctcaggcttatctacagcagtctggggctgagctggtgaggcctggggcctcagtgaagatgtcctgcaaggcttctggctacacatttaccagttacaatatgcactgggtaaagcagacacctagacagggcctggaatggattggagctatttatccaggaaatggtgatacttcctacaatcagaagttcaagggcaaggccacactgactgtagacaaatcctccagcacagcctacatgcagctcagcagcctgacatctgaagactctgcggtctatttctgtgcaagagtggtgtactatagtaactcttactggtacttcgatgtctggggcacagggaccacggtcaccgtctcttctgatcag

SEQ ID NO: 234 - protein, 268 aa, Artificial sequence
  Description of Artificial Sequence: Synthetic amino acid sequence
MDFQVQIFSFLLISASVIIARGQIVLSQSPAILSASPGEKVTMTCRASSSVSYMHWYQQKPGSSPKPWIYAPSNLASGVPARFSGSGSGTSYSLTISRVEAEDAATYYCQQWSFNPPTFGAGTKLESKDGGGSGGGGSGGGGSSQAYLQQSGAELVRPGASVKMSCKASGYTFTSYNMHWVKQTPRQGLEWIGAIYPGNGDTSYNQKFKGKATLTVDKSSSTAYMQLSSLTSEDSAVYFCARVVYYSNSYWYFDVWGTGTTVTVSSDQ

SEQ ID NO: 235 - DNA, 816 bp, Artificial sequence
  Description of Artificial Sequence: Synthetic nucleotide sequence
aagcttgccgccatggattttcaagtgcagattttcagcttcctgctaatcagtgcttcagtcataattgccagaggacaaattgttctctcccagtctccagcaatcctgtctgcatctccaggggagaaggtcacaatgacttgcagggccagctcaagtgtaagttacatgcactggtaccagcagaagccaggatcctcccccaaaccctggatttatgccccatccaacctggcttctggagtccctgctcgcttcagtggcagtgggtctgggacctcttactctctcacaatcagcagagtggaggctgaagatgctgccacttattactgccagcagtggagttttaacccacccacgttcggtgctgggaccaagctggagtctaaagatggcggtggctcgggcggtggtggatctggaggaggtgggagctctcaggcttatctacagcagtctggggctgagtcggtgaggcctggggcctcagtgaagatgtcctgcaaggcttctggctacacatttaccagttacaatatgcactgggtaaagcagacacctagacagggcctggaatggattggagctatttatccaggaaatggtgatacttcctacaatcagaagttcaagggcaaggccacactgactgtagacaaatcctccagcacagcctacatgcagctcagcagcctgacatctgaagactctgcggtctatttctgtgcaagagtggtgtactatagtaactcttactggtacttcgatgtctggggcacagggaccacggtcaccgtctcttctgatcag

SEQ ID NO: 236 - protein, 268 aa, Artificial sequence
  Description of Artificial Sequence: Synthetic amino acid sequence
MDFQVQIFSFLLISASVIIARGQIVLSQSPAILSASPGEKVTMTCRASSSVSYMHWYQQKPGSSPKPWIYAPSNLASGVPARFSGSGSGTSYSLTISRVEAEDAATYYCQQWSFNPPTFGAGTKLESKDGGGSGGGGSGGGGSSQAYLQQSGAESVRPGASVKMSCKASGYTFTSYNMHWVKQTPRQGLEWIGAIYPGNGDTSYNQKFKGKATLTVDKSSSTAYMQLSSLTSEDSAVYFCARVVYYSNSYWYFDVWGTGTTVTVSSDQ

SEQ ID NO: 237 - DNA, 199 bp, Homo sapiens
gtggatccaggttcgaagtctccaaaggcacaggcctcctccgtgcccactgcacaaccccaagcagagggcagcctcgccaaggcaaccacagccccagccaccacccgtaacacaggaagaggaggagaagagaagaagaaggagaaggagaaagaggaacaagaagagagagagacaaagaccggtgcagtcgacg

SEQ ID NO: 238 - protein, 66 aa, Homo sapiens
VDPGSKSPKAQASSVPTAQPQAEGSLAKATTAPATTRNTGRGGEEKKKEKEKEEQEERETKTGAVD

SEQ ID NO: 239 - DNA, 222 bp, Artificial sequence
  Description of Artificial Sequence: Synthetic nucleotide sequence
gagtctccaaaggcacaggcctcctccgtgcccactgcacaaccccaagcagagggcagcctcgccaaggcaaccacagccccagccaccacccgtaacacaggaagaggaggagaagagaagaagaaggagaaggagaaagaggaacaagaagagagagagacaaagacaccagagtgtccgagccacacccagcctcttggcgtctacctgctaacccct

SEQ ID NO: 240 - protein, 74 aa, Artificial sequence
  Description of Artificial Sequence: Synthetic amino acid sequence
ESPKAQASSVPTAQPQAEGSLAKATTAPATTRNTGRGGEEKKKEKEKEEQEERETKTPECPSHTQPLGVYLLTP

SEQ ID NO: 241 - DNA, 366 bp, Artificial sequence
  Description of Artificial Sequence: Synthetic nucleotide sequence
caggcttatctacagcagtctggggctgagtcggtgaggcctggggcctcagtgaagatgtcctgcaaggcttctggctacacatttaccagttacaatatgcactgggtaaagcagacacctagacagggcctggaatggattggagctatttatccaggaaatggtgatacttcctacaatcagaagttcaagggcaaggccacactgactgtagacaaatcctccagcacagcctacatgcagctcagcagcctgacatctgaagactctgcggtctatttctgtgcaagagtggtgtactatagtaactcttactggtacttcgatgtctggggcacagggaccacggtcaccgtctcttct

SEQ ID NO: 242 - protein, 122 aa, Artificial sequence
  Description of Artificial Sequence: Synthetic amino acid sequence
QAYLQQSGAESVRPGASVKMSCKASGYTFTSYNMHWVKQTPRQGLEWIGAIYPGNGDTSYNQKFKGKATLTVDKSSSTAYMQLSSLTSEDSAVYFCARVVYYSNSYWYFDVWGTGTTVTVSS

SEQ ID NO: 243 - DNA, 816 bp, Artificial sequence
  Description of Artificial Sequence: Synthetic nucleotide sequence
aagcttgccgccatggattttcaagtgcagattttcagcttcctgctaatcagtgcttcagtcataattgccagaggacaaattgttctctcccagtctccagcaatcctgtctgcatctccaggggagaaggtcacaatgacttgcagggccagctcaagtgtaagttacatgcactggtaccagcagaagccaggatcctcccccaaaccctggatttatgccccatccaacctggcttctggagtccctgctcgcttcagtggcagtgggtctgggacctcttactctctcacaatcagcagagtggaggctgaagatgctgccacttattactgccagcagtggagttttaacccacccacgttcggtgctgggaccaagctggagctgaaagatggcggtggctcgggcggtggtggatctggaggaggtgggagctctcaggcttatctacagcagtctggggctgagtcggtgaggcctggggcctcagtgaagatgtcctgcaaggcttctggctacacatttaccagttacaatatgcactgggtaaagcagacacctagacagggcctggaatggattggagctatttatccaggaaatggtgatacttcctacaatcagaagttcaagggcaaggccacactgactgtagacaaatcctccagcacagcctacatgcagctcagcagcctgacatctgaagactctgcggtctatttctgtgcaagagtggtgtactatagtaactcttactggtacttcgatgtctggggcacagggaccacggtcaccgtctcttctgatcag

SEQ ID NO: 244 - protein, 268 aa, Artificial sequence
  Description of Artificial Sequence: Synthetic amino acid sequence
MDFQVQIFSFLLISASVIIARGQIVLSQSPAILSASPGEKVTMTCRASSSVSYMHWYQQKPGSSPKPWIYAPSNLASGVPARFSGSGSGTSYSLTISRVEAEDAATYYCQQWSFNPPTFGAGTKLELKDGGGSGGGGSGGGGSSQAYLQQSGAESVRPGASVKMSCKASGYTFTSYNMHWVKQTPRQGLEWIGAIYPGNGDTSYNQKFKGKATLTVDKSSSTAYMQLSSLTSEDSAVYFCARVVYYSNSYWYFDVWGTGTTVTVSSDQ

SEQ ID NO: 245 - DNA, 1521 bp, Artificial sequence
  Description of Artificial Sequence: Synthetic nucleotide sequence
aagcttgccgccatggattttcaagtgcagattttcagcttcctgctaatcagtgcttcagtcataattgccagaggacaaattgttctctcccagtctccagcaatcctgtctgcatctccaggggagaaggtcacaatgacttgcagggccagctcaagtgtaagttacatgcactggtaccagcagaagccaggatcctcccccaaaccctggatttatgccccatccaacctggcttctggagtccctgctcgcttcagtggcagtgggtctgggacctcttactctctcacaatcagcagagtggaggctgaagatgctgccacttattactgccagcagtggagttttaacccacccacgttcggtgctgggaccaagctggagctgaaagatggcggtggctcgggcggtggtggatctggaggaggtgggagctctcaggcttatctacagcagtctggggctgagtctgtgaggcctggggcctcagtgaagatgtcctgcaaggcttctggctacacatttaccagttacaatatgcactgggtaaagcagacacctagacagggcctggaatggattggagctatttatccaggaaatggtgatacttcctacaatcagaagttcaagggcaaggccacactgactgtagacaaatcctccagcacagcctacatgcagctcagcagcctgacatctgaagactctgcggtctatttctgtgcaagagtggtgtactatagtaactcttactggtacttcgatgtctggggcacagggaccacggtcaccgtctcttctgatcaggagcccaaatcttgtgacaaaactcacacatctccaccgtgctcagcacctgaactcctgggtggaccgtcagtcttcctcttccccccaaaacccaaggacaccctcatgatctcccggacccctgaggtcacatgcgtggtggtggacgtgagccacgaagaccctgaggtcaagttcaactggtacgtggacggcgtggaggtgcataatgccaagacaaagccgcgggaggagcagtacaacagcacgtaccgtgtggtcagcgtcctcaccgtcctgcaccaggactggctgaatggcaaggagtacaagtgcaaggtctccaacaaagccctcccagcccccatcgagaaaacaatctccaaagccaaagggcagccccgagaaccacaggtgtacaccctgcccccatcccgggatgagctgaccaagaaccaggtcagcctgacctgcctggtcaaaggcttctatccaagcgacatcgccgtggagtgggagagcaatgggcagccggagaacaactacaagaccacgcctcccgtgctggactccgacggctccttcttcctctacagcaagctcaccgtggacaagagcaggtggcagcaggggaacgtcttctcatgctccgtgatgcatgaggctctgcacaaccactacacgcagaagagcctctccctgtctccgggtaaatgatctaga

SEQ ID NO: 246 - protein, 500 aa, Artificial sequence
  Description of Artificial Sequence: Synthetic amino acid sequence
MDFQVQIFSFLLISASVIIARGQIVLSQSPAILSASPGEKVTMTCRASSSVSYMHWYQQKPGSSPKPWIYAPSNLASGVPARFSGSGSGTSYSLTISRVEAEDAATYYCQQWSFNPPTFGAGTKLELKDGGGSGGGGSGGGGSSQAYLQQSGAESVRPGASVKMSCKASGYTFTSYNMHWVKQTPRQGLEWIGAIYPGNGDTSYNQKFKGKATLTVDKSSSTAYMQLSSLTSEDSAVYFCARVVYYSNSYWYFDVWGTGTTVTVSSDQEPKSCDKTHTSPPCSAPELLGGPSVFLFPPKPKDTLMISRTPEVTCVVVDVSHEDPEVKFNWYVDGVEVHNAKTKPREEQYNSTYRVVSVLTVLHQDWLNGKEYKCKVSNKALPAPIEKTISKAKGQPREPQVYTLPPSRDELTKNQVSLTCLVKGFYPSDIAVEWESNGQPENNYKTTPPVLDSDGSFFLYSKLTVDKSRWQQGNVFSCSVMHEALHNHYTQKSLSLSPGK

SEQ ID NO: 247 - DNA, 1803 bp, Artificial sequence
  Description of Artificial Sequence: Synthetic nucleotide sequence
aagcttgccgccatggattttcaagtgcagattttcagcttcctgctaatcagtgcttcagtcataattgccagaggacaaattgttctctcccagtctccagcaatcctgtctgcatctccaggggagaaggtcacaatgacttgcagggccagctcaagtgtaagttacatgcactggtaccagcagaagccaggatcctcccccaaaccctggatttatgccccatccaacctggcttctggagtccctgctcgcttcagtggcagtgggtctgggacctcttactctctcacaatcagcagagtggaggctgaagatgctgccacttattactgccagcagtggagttttaacccacccacgttcggtgctgggaccaagctggagctgaaagatggcggtggctcgggcggtggtggatctggaggaggtgggagctctcaggcttatctacagcagtctggggctgagtctgtgaggcctggggcctcagtgaagatgtcctgcaaggcttctggctacacatttaccagttacaatatgcactgggtaaagcagacacctagacagggcctggaatggattggagctatttatccaggaaatggtgatacttcctacaatcagaagttcaagggcaaggccacactgactgtagacaaatcctccagcacagcctacatgcagctcagcagcctgacatctgaagactctgcggtctatttctgtgcaagagtggtgtactatagtaactcttactggtacttcgatgtctggggcacagggaccacggtcaccgtctcttctgatcacgtctgctccagggacttcaccccgcccaccgtgaagatcttacagtcgtcctgcgacggcggcgggcacttccccccgaccatccagctcctgtgcctcgtctctgggtacaccccagggactatcaacatcacctggctggaggacgggcaggtcatggacgtggacttgtccaccgcctctaccacgcaggagggtgagctggcctccacacaaagcgagctcaccctcagccagaagcactggctgtcagaccgcacctacacctgccaggtcacctatcaaggtcacacctttgaggacagcaccaagaagtgtgcagattccaacccgagaggggtgagcgcctacctaagccggcccagcccgttcgacctgttcatccgcaagtcgcccacgatcacctgtctggtggtggacctggcacccagcaaggggaccgtgaacctgacctggtcccgggccagtgggaagcctgtgaaccactccaccagaaaggaggagaagcagcgcaatggcacgttaaccgtcacgtccaccctgccggtgggcacccgagactggatcgagggggagacctaccagtgcagggtgacccacccccacctgcccagggccctcatgcggtccacgaccaagaccagcggcccgcgtgctgccccggaagtctatgcgtttgcgacgccggagtggccggggagccgggacaagcgcaccctcgcctgcctgatccagaacttcatgcctgaggacatctcggtgcagtggctgcacaacgaggtgcagctcccggacgcccggcacagcacgacgcagccccgcaagaccaagggctccggcttcttcgtcttcagccgcctggaggtgaccagggccgaatgggagcagaaagatgagttcatctgccgtgcagtccatgaggcagcgagcccctcacagaccgtccagcgagcggtgtctgtaaatcccggtaaatgataatctaga

SEQ ID NO: 248 - protein, 593 aa, Artificial sequence
  Description of Artificial Sequence: Synthetic amino acid sequence
MDFQVQIFSFLLISASVIIARGQIVLSQSPAILSASPGEKVTMTCRASSSVSYMHWYQQKPGSSPKPWIYAPSNLASGVPARFSGSGSGTSYSLTISRVEAEDAATYYCQQWSFNPPTFGAGTKLELKDGGGSGGGGSGGGGSSQAYLQQSGAESVRPGASVKMSCKASGYTFTSYNMHWVKQTPRQGLEWIGAIYPGNGDTSYNQKFKGKATLTVDKSSSTAYMQLSSLTSEDSAVYFCARVVYYSNSYWYFDVWGTGTTVTVSSDHVCSRDFTPPTVKILQSSCDGGGHFPPTIQLLCLVSGYTPGTINITWLEDGQVMDVDLSTASTTQEGELASTQSELTLSQKHWLSDRTYTCQVTYQGHTFEDSTKKCADSNPRGVSAYLSRPSPFDLFIRKSPTITCLVVDLAPSKGTVNLTWSRASGKPVNHSTRKEEKQRNGTLTVTSTLPVGTRDWIEGETYQCRVTHPHLPRALMRSTTKTSGPRAAPEVYAFATPEWPGSRDKRTLACLIQNFMPEDISVQWLHNEVQLPDARHSTTQPRKTKGSGFFVFSRLEVTRAEWEQKDEFICRAVHEAASPSQTVQRAVSVNPGK

SEQ ID NO: 249 - DNA, 1822 bp, Artificial sequence
  Description of Artificial Sequence: Synthetic nucleotide sequence
aagcttgccgccatggattttcaagtgcagattttcagcttcctgctaatcagtgcttcagtcataattgccagaggacaaattgttctctcccagtctccagcaatcctgtctgcatctccaggggagaaggtcacaatgacttgcagggccagctcaagtgtaagttacatgcactggtaccagcagaagccaggatcctcccccaaaccctggatttatgccccatccaacctggcttctggagtccctgctcgcttcagtggcagtgggtctgggacctcttactctctcacaatcagcagagtggaggctgaagatgctgccacttattactgccagcagtggagttttaacccacccacgttcggtgctgggaccaagctggagctgaaagatggcggtggctcgggcggtggtggatctggaggaggtgggagctctcaggcttatctacagcagtctggggctgagtctgtgaggcctggggcctcagtgaagatgtcctgcaaggcttctggctacacatttaccagttacaatatgcactgggtaaagcagacacctagacagggcctggaatggattggagctatttatccaggaaatggtgatacttcctacaatcagaagttcaagggcaaggccacactgactgtagacaaatcctccagcacagcctacatgcagctcagcagcctgacatctgaagactctgcggtctatttctgtgcaagagtggtgtactatagtaactcttactggtacttcgatgtctggggcacagggaccacggtcaccgtctcttctgatcacgttcgacctgtcaacatcactgagcccaccttggagctactccattcatcctgcgaccccaatgcattccactccaccatccagctgtactgcttcatttatggccacatcctaaatgatgtctctgtcagctggctaatggacgatcgggagataactgatacacttgcacaaactgttctaatcaaggaggaaggcaaactagcctctacctgcagtaaactcaacatcactgagcagcaatggatgtctgaaagcaccttcacctgcaaggtcacctcccaaggcgtagactatttggcccacactcggagatgcccagatcatgagccacggggtgtgattacctacctgatcccacccagccccctggacctgtatcaaaacggtgctcccaagcttacctgtctggtggtggacctggaaagcgagaagaatgtcaatgtgacgtggaaccaagagaagaagacttcagtctcagcatcccagtggtacactaagcaccacaataacgccacaactagtatcacctccatcctgcctgtagttgccaaggactggattgaaggctacggctatcagtgcatagtggaccaccctgattttcccaagcccattgtgcgttccatcaccaagaccccaggccagcgctcagcccccgaggtatatgtgttcccaccaccagaggaggagagcgaggacaaacgcacactcacctgtttgatccagaacttcttccctgaggatatctctgtgcagtggctgggggatggcaaactgatctcaaacagccagcacagtaccacaacacccctgaaatccaatggctccaatcaaggcttcttcatcttcagtcgcctagaggtcgccaagacactctggacacagagaaaacagttcacctgccaagtgatccatgaggcacttcagaaacccaggaaactggagaaaacaatatccacaagccttggtaacacctccctccgtccatcctagtaatctagag

SEQ ID NO: 250 - protein, 599 aa, Artificial sequence
  Description of Artificial Sequence: Synthetic amino acid sequence
MDFQVQIFSFLLISASVIIARGQIVLSQSPAILSASPGEKVTMTCRASSSVSYMHWYQQKPGSSPKPWIYAPSNLASGVPARFSGSGSGTSYSLTISRVEAEDAATYYCQQWSFNPPTFGAGTKLELKDGGGSGGGGSGGGGSSQAYLQQSGAESVRPGASVKMSCKASGYTFTSYNMHWVKQTPRQGLEWIGAIYPGNGDTSYNQKFKGKATLTVDKSSSTAYMQLSSLTSEDSAVYFCARVVYYSNSYWYFDVWGTGTTVTVSSDHVRPVNITEPTLELLHSSCDPNAFHSTIQLYCFIYGHILNDVSVSWLMDDREITDTLAQTVLIKEEGKLASTCSKLNITEQQWMSESTFTCKVTSQGVDYLAHTRRCPDHEPRGVITYLIPPSPLDLYQNGAPKLTCLVVDLESEKNVNVTWNQEKKTSVSASQWYTKHHNNATTSITSILPVVAKDWIEGYGYQCIVDHPDFPKPIVRSITKTPGQRSAPEVYVFPPPEEESEDKRTLTCLIQNFFPEDISVQWLGDGKLISNSQHSTTTPLKSNGSNQGFFIFSRLEVAKTLWTQRKQFTCQVIHEALQKPRKLEKTISTSLGNTSLRPS

SEQ ID NO: 251 - DNA, 1572 bp, Artificial sequence
  Description of Artificial Sequence: Synthetic nucleotide sequence
aagcttgccgccatggattttcaagtgcagattttcagcttcctgctaatcagtgcttcagtcataattgccagaggacaaattgttctctcccagtctccagcaatcctgtctgcatctccaggggagaaggtcacaatgacttgcagggccagctcaagtgtaagttacatgcactggtaccagcagaagccaggatcctcccccaaaccctggatttatgccccatccaacctggcttctggagtccctgctcgcttcagtggcagtgggtctgggacctcttactctctcacaatcagcagagtggaggctgaagatgctgccacttattactgccagcagtggagttttaacccacccacgttcggtgctgggaccaagctggagctgaaagatggcggtggctcgggcggtggtggatctggaggaggtgggagctctcaggcttatctacagcagtctggggctgagtctgtgaggcctggggcctcagtgaagatgtcctgcaaggcttctggctacacatttaccagttacaatatgcactgggtaaagcagacacctagacagggcctggaatggattggagctatttatccaggaaatggtgatacttcctacaatcagaagttcaagggcaaggccacactgactgtagacaaatcctccagcacagcctacatgcagctcagcagcctgacatctgaagactctgcggtctatttctgtgcaagagtggtgtactatagtaactcttactggtacttcgatgtctggggcacagggaccacggtcaccgtctcttctgatcagccagttccctcaactccacctaccccatctccctcaactccacctaccccatctccctcatgctgccacccccgactgtcactgcaccgaccggccctcgaggacctgctcttaggttcagaagcgatcctcacgtgcacactgaccggcctgagagatgcctcaggtgtcaccttcacctggacgccctcaagtgggaagagcgctgttcaaggaccacctgaccgtgacctctgtggctgctacagcgtgtccagtgtcctgccgggctgtgccgagccatggaaccatgggaagaccttcacttgcactgctgcctaccccgagtccaagaccccgctaaccgccaccctctcaaaatccggaaacacattccggcccgaggtccacctgctgccgccgccgtcggaggagctggccctgaacgagctggtgacgctgacgtgcctggcacgtggcttcagccccaaggatgtgctggttcgctggctgcaggggtcacaggagctgccccgcgagaagtacctgacttgggcatcccggcaggagcccagccagggcaccaccaccttcgctgtgaccagcatactgcgcgtggcagccgaggactggaagaagggggacaccttctcctgcatggtgggccacgaggccctgccgctggccttcacacagaagaccatcgaccgcttggcgggtaaacccacccatgtcaatgtgtctgttgtcatggcggaggtggactgataatctaga

SEQ ID NO: 252 - protein, 516 aa, Artificial sequence
  Description of Artificial Sequence: Synthetic amino acid sequence
MDFQVQIFSFLLISASVIIARGQIVLSQSPAILSASPGEKVTMTCRASSSVSYMHWYQQKPGSSPKPWIYAPSNLASGVPARFSGSGSGTSYSLTISRVEAEDAATYYCQQWSFNPPTFGAGTKLELKDGGGSGGGGSGGGGSSQAYLQQSGAESVRPGASVKMSCKASGYTFTSYNMHWVKQTPRQGLEWIGAIYPGNGDTSYNQKFKGKATLTVDKSSSTAYMQLSSLTSEDSAVYFCARVVYYSNSYWYFDVWGTGTTVTVSSDQPVPSTPPTPSPSTPPTPSPSCCHPRLSLHRPALEDLLLGSEAILTCTLTGLRDASGVTFTWTPSSGKSAVQGPPDRDLCGCYSVSSVLPGCAEPWNHGKTFTCTAAYPESKTPLTATLSKSGNTFRPEVHLLPPPSEELALNELVTLTCLARGFSPKDVLVRWLQGSQELPREKYLTWASRQEPSQGTTTFAVTSILRVAAEDWKKGDTFSCMVGHEALPLAFTQKTIDRLAGKPTHVNVSVVMAEVD

SEQ ID NO: 253 - DNA, 1546 bp, Artificial sequence
  Description of Artificial Sequence: Synthetic nucleotide sequence
aagcttgccgccatggattttcaagtgcagattttcagcttcctgctaatcagtgcttcagtcataattgccagaggacaaattgttctctcccagtctccagcaatcctgtctgcatctccaggggagaaggtcacaatgacttgcagggccagctcaagtgtaagttacatgcactggtaccagcagaagccaggatcctcccccaaaccctggatttatgccccatccaacctggcttctggagtccctgctcgcttcagtggcagtgggtctgggacctcttactctctcacaatcagcagagtggaggctgaagatgctgccacttattactgccagcagtggagttttaacccacccacgttcggtgctgggaccaagctggagctgaaagatggcggtggctcgggcggtggtggatctggaggaggtgggagctctcaggcttatctacagcagtctggggctgagtctgtgaggcctggggcctcagtgaagatgtcctgcaaggcttctggctacacatttaccagttacaatatgcactgggtaaagcagacacctagacagggcctggaatggattggagctatttatccaggaaatggtgatacttcctacaatcagaagttcaagggcaaggccacactgactgtagacaaatcctccagcacagcctacatgcagctcagcagcctgacatctgaagactctgcggtctatttctgtgcaagagtggtgtactatagtaactcttactggtacttcgatgtctggggcacagggaccacggtcaccgtctcttctgatcacatctgttctcctcctactactcctcctccaccttcctgccagcccagcctgtcactgcagcggccagctcttgaggacctgctcctgggttcagatgccagcatcacatgtactctgaatggcctgagagatcctgagggagctgtcttcacctgggagccctccactgggaaggatgcagtgcagaagaaagctgtgcagaattcctgcggctgctacagtgtgtccagcgtcctgcctggctgtgctgagcgctggaacagtggcgcatcattcaagtgcacagttacccatcctgagtctgacaccttaactggcacaattgccaaagtcacagtgaacaccttcccaccccaggtccacctgctaccgccgccgtcggaggagctggccctgaatgagctcgtgtccctgacatgcctggtgcgagctttcaaccctaaagaagtgctggtgcgatggctgcatggaaatgaggagctgtccccagaaagctacctagtgtttgagcccctaaaggagccaggcgagggagccaccacctacctggtgacaagcgtgttgcgtgtatcagctgaaatctggaaacagggtgaccagtactcctgcatggtgggccacgaggccttgcccatgaacttcacccagaagaccatcgaccgtctgtcgggtaaacccaccaatgtcagcgtgtctgtgatcatgtcagagggagattgataatctagat

SEQ ID NO: 254 - protein, 507 aa, Artificial sequence
  Description of Artificial Sequence: Synthetic amino acid sequence
MDFQVQIFSFLLISASVIIARGQIVLSQSPAILSASPGEKVTMTCRASSSVSYMHWYQQKPGSSPKPWIYAPSNLASGVPARFSGSGSGTSYSLTISRVEAEDAATYYCQQWSFNPPTFGAGTKLELKDGGGSGGGGSGGGGSSQAYLQQSGAESVRPGASVKMSCKASGYTFTSYNMHWVKQTPRQGLEWIGAIYPGNGDTSYNQKFKGKATLTVDKSSSTAYMQLSSLTSEDSAVYFCARVVYYSNSYWYFDVWGTGTTVTVSSDHICSPPTTPPPPSCQPSLSLQRPALEDLLLGSDASITCTLNGLRDPEGAVFTWEPSTGKDAVQKKAVQNSCGCYSVSSVLPGCAERWNSGASFKCTVTHPESDTLTGTIAKVTVNTFPPQVHLLPPPSEELALNELVSLTCLVRAFNPKEVLVRWLHGNEELSPESYLVFEPLKEPGEGATTYLVTSVLRVSAEIWKQGDQYSCMVGHEALPMNFTQKTIDRLSGKPTNVSVSVIMSEGD

SEQ ID NO: 255 - DNA, 742 bp, Artificial sequence
  Description of Artificial Sequence: Synthetic nucleotide sequence
gttgttgatcacatctgttctcctcctactactcctcctccaccttcctgccagcccagcctgtcactgcagcggccagctcttgaggacctgctcctgggttcagatgccagcatcacatgtactctgaatggcctgagagatcctgagggagctgtcttcacctgggagccctccactgggaaggatgcagtgcagaagaaagctgtgcagaattcctgcggctgctacagtgtgtccagcgtcctgcctggctgtgctgagcgctggaacagtggcgcatcattcaagtgcacagttacccatcctgagtctgacaccttaactggcacaattgccaaagtcacagtgaacaccttcccaccccaggtccacctgctaccgccgccgtcggaggagctggccctgaatgagctcgtgtccctgacatgcctggtgcgagctttcaaccctaaagaagtgctggtgcgatggctgcatggaaatgaggagctgtccccagaaagctacctagtgtttgagcccctaaaggagccaggcgagggagccaccacctacctggtgacaagcgtgttgcgtgtatcagctgaaatctggaaacagggtgaccagtactcctgcatggtgggccacgaggccttgcccatgaacttcacccagaagaccatcgaccgtctgtcgggtaaacccaccaatgtcagcgtgtctgtgatcatgtcagagggagattgataatctagat

SEQ ID NO: 256 - protein, 241 aa, Artificial sequence
  Description of Artificial Sequence: Synthetic amino acid sequence
DHICSPPTTPPPPSCQPSLSLQRPALEDLLLGSDASITCTLNGLRDPEGAVFTWEPSTGKDAVQKKAVQNSCGCYSVSSVLPGCAERWNSGASFKCTVTHPESDTLTGTIAKVTVNTFPPQVHLLPPPSEELALNELVSLTCLVRAFNPKEVLVRWLHGNEELSPESYLVFEPLKEPGEGATTYLVTSVLRVSAEIWKQGDQYSCMVGHEALPMNFTQKTIDRLSGKPTNVSVSVIMSEGD

SEQ ID NO: 257 - DNA, 327 bp, Artificial sequence
  Description of Artificial Sequence: Synthetic nucleotide sequence
cctgaactcctggggggaccgtcagtcttcctcttccccccaaaacccaaggacaccctcatgatctcccggacccctgaggtcacatgcgtggtggtggacgtgagccacgaagaccctgaggtcaagttcaactggtacgtggacggcgtggaggtgcataatgccaagacaaagccgcgggaggagcagtacaacagcacgtaccgtgtggtcagcgtcctcaccgtcctgcaccaggactggctgaatggcaaggagtacaagtgctcggtctccaacaaagccctcccagcccccatcgagaaaacaatctccaaagccaaa

SEQ ID NO: 258 - protein, 109 aa, Artificial sequence
  Description of Artificial Sequence: Synthetic amino acid sequence
PELLGGPSVFLFPPKPKDTLMISRTPEVTCVVVDVSHEDPEVKFNWYVDGVEVHNAKTKPREEQYNSTYRVVSVLTVLHQDWLNGKEYKCSVSNKALPAPIEKTISKAK

SEQ ID NO: 259 - DNA, 657 bp, Artificial sequence
  Description of Artificial Sequence: Synthetic nucleotide sequence
cctgaactcctggggggaccgtcagtcttcctcttccccccaaaacccaaggacaccctcatgatctcccggacccctgaggtcacatgcgtggtggtggacgtgagccacgaagaccctgaggtcaagttcaactggtacgtggacggcgtggaggtgcataatgccaagacaaagccgcgggaggagcagtacaacagcacgtaccgtgtggtcagcgtcctcaccgtcctgcaccaggactggctgaatggcaaggagtacaagtgctcggtctccaacaaagccctcccagcccccatcgagaaaacaatctccaaagccaaagggcagccccgagaaccacaggtgtacaccctgcccccatcccgggatgagctgaccaagaaccaggtcagcctgacctgcctggtcaaaggcttctatcccagcgacatcgccgtggagtgggagagcaatgggcagccggagaacaactacaagaccacgcctcccgtgctggactccgacggctccttcttcctctacagcaagctcaccgtggacaagagcaggtggcagcaggggaacgtcttctcatgctccgtgatgcatgaggctctgcacaaccactacacgcagaagagcctctccctgtctccgggtaaatgatctaga

SEQ ID NO: 260 - protein, 216 aa, Artificial sequence
  Description of Artificial Sequence: Synthetic amino acid sequence
PELLGGPSVFLFPPKPKDTLMISRTPEVTCVVVDVSHEDPEVKFNWYVDGVEVHNAKTKPREEQYNSTYRVVSVLTVLHQDWLNGKEYKCSVSNKALPAPIEKTISKAKGQPREPQVYTLPPSRDELTKNQVSLTCLVKGFYPSDIAVEWESNGQPENNYKTTPPVLDSDGSFFLYSKLTVDKSRWQQGNVFSCSVMHEALHNHYTQKSLSLSPGK

SEQ ID NO: 261 - DNA, 712 bp, Artificial sequence
  Description of Artificial Sequence: Synthetic nucleotide sequence
tgatcaggagcccaaatcttctgacaaaactcacacatccccaccgtcctcagcacctgaactcctggggggaccgtcagtcttcctcttccccccaaaacccaaggacaccctcatgatctcccggacccctgaggtcacatgcgtggtggtggacgtgagccacgaagaccctgaggtcaagttcaactggtacgtggacggcgtggaggtgcataatgccaagacaaagccgcgggaggagcagtacaacagcacgtaccgtgtggtcagcgtcctcaccgtcctgcaccaggactggctgaatggcaaggagtacaagtgcctggtctccaacaaagccctcccagcccccatcgagaaaacaatctccaaagccaaagggcagccccgagaaccacaggtgtacaccctgcccccatcccgggatgagctgaccaagaaccaggtcagcctgacctgcctggtcaaaggcttctatcccagcgacatcgccgtggagtgggagagcaatgggcagccggagaacaactacaagaccacgcctcccgtgctggactccgacggctccttcttcctctacagcaagctcaccgtggacaagagcaggtggcagcaggggaacgtcttctcatgctccgtgatgcatgaggctctgcacaaccactacacgcagaagagcctctccctgtctccgggtaaatgatctaga

SEQ ID NO: 262 - protein, 234 aa, Artificial sequence
  Description of Artificial Sequence: Synthetic amino acid sequence
DQEPKSSDKTHTSPPSSAPELLGGPSVFLFPPKPKDTLMISRTPEVTCVVVDVSHEDPEVKFNWYVDGVEVHNAKTKPREEQYNSTYRVVSVLTVLHQDWLNGKEYKCLVSNKALPAPIEKTISKAKGQPREPQVYTLPPSRDELTKNQVSLTCLVKGFYPSDIAVEWESNGQPENNYKTTPPVLDSDGSFFLYSKLTVDKSRWQQGNVFSCSVMHEALHNHYTQKSLSLSPGK

SEQ ID NO: 263 - DNA, 1521 bp, Artificial sequence
  Description of Artificial Sequence: Synthetic nucleotide sequence
aagcttgccgccatggattttcaagtgcagattttcagcttcctgctaatcagtgcttcagtcataattgccagaggacaaattgttctctcccagtctccagcaatcctgtctgcatctccaggggagaaggtcacaatgacttgcagggccagctcaagtgtaagttacatgcactggtaccagcagaagccaggatcctcccccaaaccctggatttatgccccatccaacctggcttctggagtccctgctcgcttcagtggcagtgggtctgggacctcttactctctcacaatcagcagagtggaggctgaagatgctgccacttattactgccagcagtggagttttaacccacccacgttcggtgctgggaccaagctggagctgaaagatggcggtggctcgggcggtggtggatctggaggaggtgggagctctcaggcttatctacagcagtctggggctgagtcggtgaggcctggggcctcagtgaagatgtcctgcaaggcttctggctacacatttaccagttacaatatgcactgggtaaagcagacacctagacagggcctggaatggattggagctatttatccaggaaatggtgatacttcctacaatcagaagttcaagggcaaggccacactgactgtagacaaatcctccagcacagcctacatgcagctcagcagcctgacatctgaagactctgcggtctatttctgtgcaagagtggtgtactatagtaactcttactggtacttcgatgtctggggcacagggaccacggtcaccgtctcttctgatcaggagcccaaatcttctgacaaaactcacacatccccaccgtcctcagcacctgaactcctggggggaccgtcagtcttcctcttccccccaaaacccaaggacaccctcatgatctcccggacccctgaggtcacatgcgtggtggtggacgtgagccacgaagaccctgaggtcaagttcaactggtacgtggacggcgtggaggtgcataatgccaagacaaagccgcgggaggagcagtacaacagcacgtaccgtgtggtcagcgtcctcaccgtcctgcaccaggactggctgaatggcaaggagtacaagtgctcggtctccaacaaagccctcccagcccccatcgagaaaacaatctccaaagccaaagggcagccccgagaaccacaggtgtacaccctgcccccatcccgggatgagctgaccaagaaccaggtcagcctgacctgcctggtcaaaggcttctatcccagcgacatcgccgtggagtgggagagcaatgggcagccggagaacaactacaagaccacgcctcccgtgctggactccgacggctccttcttcctctacagcaagctcaccgtggacaagagcaggtggcagcaggggaacgtcttctcatgctccgtgatgcatgaggctctgcacaaccactacacgcagaagagcctctccctgtctccgggtaaatgatctaga

SEQ ID NO: 264 - protein, 500 aa, Artificial sequence
  Description of Artificial Sequence: Synthetic amino acid sequence
MDFQVQIFSFLLISASVIIARGQIVLSQSPAILSASPGEKVTMTCRASSSVSYMHWYQQKPGSSPKPWIYAPSNLASGVPARFSGSGSGTSYSLTISRVEAEDAATYYCQQWSFNPPTFGAGTKLELKDGGGSGGGGSGGGGSSQAYLQQSGAESVRPGASVKMSCKASGYTFTSYNMHWVKQTPRQGLEWIGAIYPGNGDTSYNQKFKGKATLTVDKSSSTAYMQLSSLTSEDSAVYFCARVVYYSNSYWYFDVWGTGTTVTVSSDQEPKSSDKTHTSPPSSAPELLGGPSVFLFPPKPKDTLMISRTPEVTCVVVDVSHEDPEVKFNWYVDGVEVHNAKTKPREEQYNSTYRVVSVLTVLHQDWLNGKEYKCSVSNKALPAPIEKTISKAKGQPREPQVYTLPPSRDELTKNQVSLTCLVKGFYPSDIAVEWESNGQPENNYKTTPPVLDSDGSFFLYSKLTVDKSRWQQGNVFSCSVMHEALHNHYTQKSLSLSPGK

SEQ ID NO: 265 - DNA, 1521 bp, Artificial sequence
  Description of Artificial Sequence: Synthetic nucleotide sequence
aagcttgccgccatggattttcaagtgcagattttcagcttcctgctaatcagtgcttcagtcataattgccagaggacaaattgttctctcccagtctccagcaatcctgtctgcatctccaggggagaaggtcacaatgacttgcagggccagctcaagtgtaagttacatgcactggtaccagcagaagccaggatcctcccccaaaccctggatttatgccccatccaacctggcttctggagtccctgctcgcttcagtggcagtgggtctgggacctcttactctctcacaatcagcagagtggaggctgaagatgctgccacttattactgccagcagtggagttttaacccacccacgttcggtgctgggaccaagctggagctgaaagatggcggtggctcgggcggtggtggatctggaggaggtgggagctctcaggcttatctacagcagtctggggctgagtcggtgaggcctggggcctcagtgaagatgtcctgcaaggcttctggctacacatttaccagttacaatatgcactgggtaaagcagacacctagacagggcctggaatggattggagctatttatccaggaaatggtgatacttcctacaatcagaagttcaagggcaaggccacactgactgtagacaaatcctccagcacagcctacatgcagctcagcagcctgacatctgaagactctgcggtctatttctgtgcaagagtggtgtactatagtaactcttactggtacttcgatgtctggggcacagggaccacggtcaccgtctcttctgatcaggagcccaaatcttctgacaaaactcacacatccccaccgtcctcagcacctgaactcctggggggaccgtcagtcttcctcttccccccaaaacccaaggacaccctcatgatctcccggacccctgaggtcacatgcgtggtggtggacgtgagccacgaagaccctgaggtcaagttcaactggtacgtggacggcgtggaggtgcataatgccaagacaaagccgcgggaggagcagtacaacagcacgtaccgtgtggtcagcgtcctcaccgtcctgcaccaggactggctgaatggcaaggagtacaagtgcctggtctccaacaaagccctcccagcccccatcgagaaaacaatctccaaagccaaagggcagccccgagaaccacaggtgtacaccctgcccccatcccgggatgagctgaccaagaaccaggtcagcctgacctgcctggtcaaaggcttctatcccagcgacatcgccgtggagtgggagagcaatgggcagccggagaacaactacaagaccacgcctcccgtgctggactccgacggctccttcttcctctacagcaagctcaccgtggacaagagcaggtggcagcaggggaacgtcttctcatgctccgtgatgcatgaggctctgcacaaccactacacgcagaagagcctctccctgtctccgggtaaatgatctaga

SEQ ID NO: 266 - protein, 500 aa, Artificial sequence
  Description of Artificial Sequence: Synthetic amino acid sequence
MDFQVQIFSFLLISASVIIARGQIVLSQSPAILSASPGEKVTMTCRASSSVSYMHWYQQKPGSSPKPWIYAPSNLASGVPARFSGSGSGTSYSLTISRVEAEDAATYYCQQWSFNPPTFGAGTKLELKDGGGSGGGGSGGGGSSQAYLQQSGAESVRPGASVKMSCKASGYTFTSYNMHWVKQTPRQGLEWIGAIYPGNGDTSYNQKFKGKATLTVDKSSSTAYMQLSSLTSEDSAVYFCARVVYYSNSYWYFDVWGTGTTVTVSSDQEPKSSDKTHTSPPSSAPELLGGPSVFLFPPKPKDTLMISRTPEVTCVVVDVSHEDPEVKFNWYVDGVEVHNAKTKPREEQYNSTYRVVSVLTVLHQDWLNGKEYKCLVSNKALPAPIEKTISKAKGQPREPQVYTLPPSRDELTKNQVSLTCLVKGFYPSDIAVEWESNGQPENNYKTTPPVLDSDGSFFLYSKLTVDKSRWQQGNVFSCSVMHEALHNHYTQKSLSLSPGK

SEQ ID NO: 267 - DNA, 1521 bp, Artificial sequence
  Description of Artificial Sequence: Synthetic nucleotide sequence
aagcttgccgccatggattttcaagtgcagattttcagcttcctgctaatcagtgcttcagtcataattgccagaggacaaattgttctctcccagtctccagcaatcctgtctgcatctccaggggagaaggtcacaatgacttgcagggccagctcaagtgtaagttacatgcactggtaccagcagaagccaggatcctcccccaaaccctggatttatgccccatccaacctggcttctggagtccctgctcgcttcagtggcagtgggtctgggacctcttactctctcacaatcagcagagtggaggctgaagatgctgccacttattactgccagcagtggagttttaacccacccacgttcggtgctgggaccaagctggagctgaaagatggcggtggctcgggcggtggtggatctggaggaggtgggagctctcaggcttatctacagcagtctggggctgagtcggtgaggcctggggcctcagtgaagatgtcctgcaaggcttctggctacacatttaccagttacaatatgcactgggtaaagcagacacctagacagggcctggaatggattggagctatttatccaggaaatggtgatacttcctacaatcagaagttcaagggcaaggccacactgactgtagacaaatcctccagcacagcctacatgcagctcagcagcctgacatctgaagactctgcggtctatttctgtgcaagagtggtgtactatagtaactcttactggtacttcgatgtctggggcacagggaccacggtcaccgtctcttctgatcaggagcccaaatcttgtgacaaaactcacacatccccaccgtcctcagcacctgaactcctggggggaccgtcagtcttcctcttccccccaaaacccaaggacaccctcatgatctcccggacccctgaggtcacatgcgtggtggtggacgtgagccacgaagaccctgaggtcaagttcaactggtacgtggacggcgtggaggtgcataatgccaagacaaagccgcgggaggagcagtacaacagcacgtaccgtgtggtcagcgtcctcaccgtcctgcaccaggactggctgaatggcaaggagtacaagtgctcggtctccaacaaagccctcccagcccccatcgagaaaacaatctccaaagccaaagggcagccccgagaaccacaggtgtacaccctgcccccatcccgggatgagctgaccaagaaccaggtcagcctgacctgcctggtcaaaggcttctatcccagcgacatcgccgtggagtgggagagcaatgggcagccggagaacaactacaagaccacgcctcccgtgctggactccgacggctccttcttcctctacagcaagctcaccgtggacaagagcaggtggcagcaggggaacgtcttctcatgctccgtgatgcatgaggctctgcacaaccactacacgcagaagagcctctccctgtctccgggtaaatgatctaga

SEQ ID NO: 268 - protein, 500 aa, Artificial sequence
  Description of Artificial Sequence: Synthetic amino acid sequence
MDFQVQIFSFLLISASVIIARGQIVLSQSPAILSASPGEKVTMTCRASSSVSYMHWYQQKPGSSPKPWIYAPSNLASGVPARFSGSGSGTSYSLTISRVEAEDAATYYCQQWSFNPPTFGAGTKLELKDGGGSGGGGSGGGGSSQAYLQQSGAESVRPGASVKMSCKASGYTFTSYNMHWVKQTPRQGLEWIGAIYPGNGDTSYNQKFKGKATLTVDKSSSTAYMQLSSLTSEDSAVYFCARVVYYSNSYWYFDVWGTGTTVTVSSDQEPKSCDKTHTSPPSSAPELLGGPSVFLFPPKPKDTLMISRTPEVTCVVVDVSHEDPEVKFNWYVDGVEVHNAKTKPREEQYNSTYRVVSVLTVLHQDWLNGKEYKCSVSNKALPAPIEKTISKAKGQPREPQVYTLPPSRDELTKNQVSLTCLVKGFYPSDIAVEWESNGQPENNYKTTPPVLDSDGSFFLYSKLTVDKSRWQQGNVFSCSVMHEALHNHYTQKSLSLSPGK

SEQ ID NO: 269 - DNA, 327 bp, Artificial sequence
  Description of Artificial Sequence: Synthetic nucleotide sequence
cctgaactcctggggggaccgtcagtcttcctcttccccccaaaacccaaggacaccctcatgatctcccggacccctgaggtcacatgcgtggtggtggacgtgagccacgaagaccctgaggtcaagttcaactggtacgtggacggcgtggaggtgcataatgccaagacaaagccgcgggaggagcagtacaacagcacgtaccgtgtggtcagcgtcctcaccgtcctgcaccaggactggctgaatggcaaggagtacaagtgcaaggtctccaacaaagccctcccagcctccatcgagaaaacaatctccaaagccaaa

SEQ ID NO: 270 - protein, 109 aa, Artificial sequence
  Description of Artificial Sequence: Synthetic amino acid sequence
PELLGGPSVFLFPPKPKDTLMISRTPEVTCVVVDVSHEDPEVKFNWYVDGVEVHNAKTKPREEQYNSTYRVVSVLTVLHQDWLNGKEYKCKVSNKALPASIEKTISKAK

SEQ ID NO: 271 - DNA, 657 bp, Artificial sequence
  Description of Artificial Sequence: Synthetic nucleotide sequence
cctgaactcctggggggaccgtcagtcttcctcttccccccaaaacccaaggacaccctcatgatctcccggacccctgaggtcacatgcgtggtggtggacgtgagccacgaagaccctgaggtcaagttcaactggtacgtggacggcgtggaggtgcataatgccaagacaaagccgcgggaggagcagtacaacagcacgtaccgtgtggtcagcgtcctcaccgtcctgcaccaggactggctgaatggcaaggagtacaagtgcaaggtctccaacaaagccctcccagcctccatcgagaaaacaatctccaaagccaaagggcagccccgagaaccacaggtgtacaccctgcccccatcccgggatgagctgaccaagaaccaggtcagcctgacctgcctggtcaaaggcttctatcccagcgacatcgccgtggagtgggagagcaatgggcagccggagaacaactacaagaccacgcctcccgtgctggactccgacggctccttcttcctctacagcaagctcaccgtggacaagagcaggtggcagcaggggaacgtcttctcatgctccgtgatgcatgaggctctgcacaaccactacacgcagaagagcctctccctgtctccgggtaaatgatctaga

SEQ ID NO: 272 - protein, 216 aa, Artificial sequence
  Description of Artificial Sequence: Synthetic amino acid sequence
PELLGGPSVFLFPPKPKDTLMISRTPEVTCVVVDVSHEDPEVKFNWYVDGVEVHNAKTKPREEQYNSTYRVVSVLTVLHQDWLNGKEYKCKVSNKALPASIEKTISKAKGQPREPQVYTLPPSRDELTKNQVSLTCLVKGFYPSDIAVEWESNGQPENNYKTTPPVLDSDGSFFLYSKLTVDKSRWQQGNVFSCSVMHEALHNHYTQKSLSLSPGK

SEQ ID NO: 273 - DNA, 1521 bp, Artificial sequence
  Description of Artificial Sequence: Synthetic nucleotide sequence
aagcttgccgccatggattttcaagtgcagattttcagcttcctgctaatcagtgcttcagtcataattgccagaggacaaattgttctctcccagtctccagcaatcctgtctgcatctccaggggagaaggtcacaatgacttgcagggccagctcaagtgtaagttacatgcactggtaccagcagaagccaggatcctcccccaaaccctggatttatgccccatccaacctggcttctggagtccctgctcgcttcagtggcagtgggtctgggacctcttactctctcacaatcagcagagtggaggctgaagatgctgccacttattactgccagcagtggagttttaacccacccacgttcggtgctgggaccaagctggagctgaaagatggcggtggctcgggcggtggtggatctggaggaggtgggagctctcaggcttatctacagcagtctggggctgagtcggtgaggcctggggcctcagtgaagatgtcctgcaaggcttctggctacacatttaccagttacaatatgcactgggtaaagcagacacctagacagggcctggaatggattggagctatttatccaggaaatggtgatacttcctacaatcagaagttcaagggcaaggccacactgactgtagacaaatcctccagcacagcctacatgcagctcagcagcctgacatctgaagactctgcggtctatttctgtgcaagagtggtgtactatagtaactcttactggtacttcgatgtctggggcacagggaccacggtcaccgtctcttctgatcaggagcccaaatcttctgacaaaactcacacatccccaccgtcctcagcacctgaactcctggggggaccgtcagtcttcctcttccccccaaaacccaaggacaccctcatgatctcccggacccctgaggtcacatgcgtggtggtggacgtgagccacgaagaccctgaggtcaagttcaactggtacgtggacggcgtggaggtgcataatgccaagacaaagccgcgggaggagcagtacaacagcacgtaccgtgtggtcagcgtcctcaccgtcctgcaccaggactggctgaatggcaaggagtacaagtgcaaggtctccaacaaagccctcccagcctccatcgagaaaacaatctccaaagccaaagggcagccccgagaaccacaggtgtacaccctgcccccatcccgggatgagctgaccaagaaccaggtcagcctgacctgcctggtcaaaggcttctatcccagcgacatcgccgtggagtgggagagcaatgggcagccggagaacaactacaagaccacgcctcccgtgctggactccgacggctccttcttcctctacagcaagctcaccgtggacaagagcaggtggcagcaggggaacgtcttctcatgctccgtgatgcatgaggctctgcacaaccactacacgcagaagagcctctccctgtctccgggtaaatgatctaga

SEQ ID NO: 274 - protein, 500 aa, Artificial sequence
  Description of Artificial Sequence: Synthetic amino acid sequence
MDFQVQIFSFLLISASVIIARGQIVLSQSPAILSASPGEKVTMTCRASSSVSYMHWYQQKPGSSPKPWIYAPSNLASGVPARFSGSGSGTSYSLTISRVEAEDAATYYCQQWSFNPPTFGAGTKLELKDGGGSGGGGSGGGGSSQAYLQQSGAESVRPGASVKMSCKASGYTFTSYNMHWVKQTPRQGLEWIGAIYPGNGDTSYNQKFKGKATLTVDKSSSTAYMQLSSLTSEDSAVYFCARVVYYSNSYWYFDVWGTGTTVTVSSDQEPKSSDKTHTSPPSSAPELLGGPSVFLFPPKPKDTLMISRTPEVTCVVVDVSHEDPEVKFNWYVDGVEVHNAKTKPREEQYNSTYRVVSVLTVLHQDWLNGKEYKCKVSNKALPASIEKTISKAKGQPREPQVYTLPPSRDELTKNQVSLTCLVKGFYPSDIAVEWESNGQPENNYKTTPPVLDSDGSFFLYSKLTVDKSRWQQGNVFSCSVMHEALHNHYTQKSLSLSPGK

SEQ ID NO: 275 - DNA, 1521 bp, Artificial sequence
  Description of Artificial Sequence: Synthetic nucleotide sequence
aagcttgccgccatggattttcaagtgcagattttcagcttcctgctaatcagtgcttcagtcataattgccagaggacaaattgttctctcccagtctccagcaatcctgtctgcatctccaggggagaaggtcacaatgacttgcagggccagctcaagtgtaagttacatgcactggtaccagcagaagccaggatcctcccccaaaccctggatttatgccccatccaacctggcttctggagtccctgctcgcttcagtggcagtgggtctgggacctcttactctctcacaatcagcagagtggaggctgaagatgctgccacttattactgccagcagtggagttttaacccacccacgttcggtgctgggaccaagctggagctgaaagatggcggtggctcgggcggtggtggatctggaggaggtgggagctctcaggcttatctacagcagtctggggctgagtcggtgaggcctggggcctcagtgaagatgtcctgcaaggcttctggctacacatttaccagttacaatatgcactgggtaaagcagacacctagacagggcctggaatggattggagctatttatccaggaaatggtgatacttcctacaatcagaagttcaagggcaaggccacactgactgtagacaaatcctccagcacagcctacatgcagctcagcagcctgacatctgaagactctgcggtctatttctgtgcaagagtggtgtactatagtaactcttactggtacttcgatgtctggggcacagggaccacggtcaccgtctcttctgatcaggagcccaaatcttgtgacaaaactcacacatccccaccgtcctcagcacctgaactcctggggggaccgtcagtcttcctcttccccccaaaacccaaggacaccctcatgatctcccggacccctgaggtcacatgcgtggtggtggacgtgagccacgaagaccctgaggtcaagttcaactggtacgtggacggcgtggaggtgcataatgccaagacaaagccgcgggaggagcagtacaacagcacgtaccgtgtggtcagcgtcctcaccgtcctgcaccaggactggctgaatggcaaggagtacaagtgcaaggtctccaacaaagccctcccagcctccatcgagaaaacaatctccaaagccaaagggcagccccgagaaccacaggtgtacaccctgcccccatcccgggatgagctgaccaagaaccaggtcagcctgacctgcctggtcaaaggcttctatcccagcgacatcgccgtggagtgggagagcaatgggcagccggagaacaactacaagaccacgcctcccgtgctggactccgacggctccttcttcctctacagcaagctcaccgtggacaagagcaggtggcagcaggggaacgtcttctcatgctccgtgatgcatgaggctctgcacaaccactacacgcagaagagcctctccctgtctccgggtaaatgatctaga

SEQ ID NO: 276 - protein, 500 aa, Artificial sequence
  Description of Artificial Sequence: Synthetic amino acid sequence
MDFQVQIFSFLLISASVIIARGQIVLSQSPAILSASPGEKVTMTCRASSSVSYMHWYQQKPGSSPKPWIYAPSNLASGVPARFSGSGSGTSYSLTISRVEAEDAATYYCQQWSFNPPTFGAGTKLELKDGGGSGGGGSGGGGSSQAYLQQSGAESVRPGASVKMSCKASGYTFTSYNMHWVKQTPRQGLEWIGAIYPGNGDTSYNQKFKGKATLTVDKSSSTAYMQLSSLTSEDSAVYFCARVVYYSNSYWYFDVWGTGTTVTVSSDQEPKSCDKTHTSPPSSAPELLGGPSVFLFPPKPKDTLMISRTPEVTCVVVDVSHEDPEVKFNWYVDGVEVHNAKTKPREEQYNSTYRVVSVLTVLHQDWLNGKEYKCKVSNKALPASIEKTISKAKGQPREPQVYTLPPSRDELTKNQVSLTCLVKGFYPSDIAVEWESNGQPENNYKTTPPVLDSDGSFFLYSKLTVDKSRWQQGNVFSCSVMHEALHNHYTQKSLSLSPGK

SEQ ID NO: 277 - DNA, 327 bp, Artificial sequence
  Description of Artificial Sequence: Synthetic nucleotide sequence
cctgaactcctggggggaccgtcagtcttcctcttccccccaaaacccaaggacaccctcatgatctcccggaaccctgaggtcacatgcgtggtggtggacgtgagccacgaagaccctgaggtcaagttcaactggtacgtggacggcgtggaggtgcataatgccaagacaaagccgcgggaggagcagtacaacagcacgtaccgtgtggtcagcgtcctcaccgtcctgcaccaggactggctgaatggcaaggagtacaagtgcaaggtctccaacaaagccctcccagcccccatcgagaaaacaatctccaaagccaaa

SEQ ID NO: 278 - protein, 109 aa, Artificial sequence
  Description of Artificial Sequence: Synthetic amino acid sequence
PELLGGPSVFLFPPKPKDTLMISRNPEVTCVVVDVSHEDPEVKFNWYVDGVEVHNAKTKPREEQYNSTYRVVSVLTVLHQDWLNGKEYKCKVSNKALPAPIEKTISKAK

SEQ ID NO: 279 - DNA, 657 bp, Artificial sequence
  Description of Artificial Sequence: Synthetic nucleotide sequence
cctgaactcctggggggaccgtcagtcttcctcttccccccaaaacccaaggacaccctcatgatctcccggaaccctgaggtcacatgcgtggtggtggacgtgagccacgaagaccctgaggtcaagttcaactggtacgtggacggcgtggaggtgcataatgccaagacaaagccgcgggaggagcagtacaacagcacgtaccgtgtggtcagcgtcctcaccgtcctgcaccaggactggctgaatggcaaggagtacaagtgcaaggtctccaacaaagccctcccagcccccatcgagaaaacaatctccaaagccaaagggcagccccgagaaccacaggtgtacaccctgcccccatcccgggatgagctgaccaagaaccaggtcagcctgacctgcctggtcaaaggcttctatcccagcgacatcgccgtggagtgggagagcaatgggcagccggagaacaactacaagaccacgcctcccgtgctggactccgacggctccttcttcctctacagcaagctcaccgtggacaagagcaggtggcagcaggggaacgtcttctcatgctccgtgatgcatgaggctctgcacaaccactacacgcagaagagcctctccctgtctccgggtaaatgatctaga

SEQ ID NO: 280 - protein, 216 aa, Artificial sequence
  Description of Artificial Sequence: Synthetic amino acid sequence
PELLGGPSVFLFPPKPKDTLMISRNPEVTCVVVDVSHEDPEVKFNWYVDGVEVHNAKTKPREEQYNSTYRVVSVLTVLHQDWLNGKEYKCKVSNKALPAPIEKTISKAKGQPREPQVYTLPPSRDELTKNQVSLTCLVKGFYPSDIAVEWESNGQPENNYKTTPPVLDSDGSFFLYSKLTVDKSRWQQGNVFSCSVMHEALHNHYTQKSLSLSPGK

SEQ ID NO: 281 - DNA, 1521 bp, Artificial sequence
  Description of Artificial Sequence: Synthetic nucleotide sequence
aagcttgccgccatggattttcaagtgcagattttcagcttcctgctaatcagtgcttcagtcataattgccagaggacaaattgttctctcccagtctccagcaatcctgtctgcatctccaggggagaaggtcacaatgacttgcagggccagctcaagtgtaagttacatgcactggtaccagcagaagccaggatcctcccccaaaccctggatttatgccccatccaacctggcttctggagtccctgctcgcttcagtggcagtgggtctgggacctcttactctctcacaatcagcagagtggaggctgaagatgctgccacttattactgccagcagtggagttttaacccacccacgttcggtgctgggaccaagctggagctgaaagatggcggtggctcgggcggtggtggatctggaggaggtgggagctctcaggcttatctacagcagtctggggctgagtcggtgaggcctggggcctcagtgaagatgtcctgcaaggcttctggctacacatttaccagttacaatatgcactgggtaaagcagacacctagacagggcctggaatggattggagctatttatccaggaaatggtgatacttcctacaatcagaagttcaagggcaaggccacactgactgtagacaaatcctccagcacagcctacatgcagctcagcagcctgacatctgaagactctgcggtctatttctgtgcaagagtggtgtactatagtaactcttactggtacttcgatgtctggggcacagggaccacggtcaccgtctcttctgatcaggagcccaaatcttctgacaaaactcacacatccccaccgtcctcagcacctgaactcctggggggaccgtcagtcttcctcttccccccaaaacccaaggacaccctcatgatctcccggaaccctgaggtcacatgcgtggtggtggacgtgagccacgaagaccctgaggtcaagttcaactggtacgtggacggcgtggaggtgcataatgccaagacaaagccgcgggaggagcagtacaacagcacgtaccgtgtggtcagcgtcctcaccgtcctgcaccaggactggctgaatggcaaggagtacaagtgcaaggtctccaacaaagccctcccagcccccatcgagaaaacaatctccaaagccaaagggcagccccgagaaccacaggtgtacaccctgcccccatcccgggatgagctgaccaagaaccaggtcagcctgacctgcctggtcaaaggcttctatcccagcgacatcgccgtggagtgggagagcaatgggcagccggagaacaactacaagaccacgcctcccgtgctggactccgacggctccttcttcctctacagcaagctcaccgtggacaagagcaggtggcagcaggggaacgtcttctcatgctccgtgatgcatgaggctctgcacaaccactacacgcagaagagcctctccctgtctccgggtaaatgatctaga

SEQ ID NO: 282 - protein, 500 aa, Artificial sequence
  Description of Artificial Sequence: Synthetic amino acid sequence
MDFQVQIFSFLLISASVIIARGQIVLSQSPAILSASPGEKVTMTCRASSSVSYMHWYQQKPGSSPKPWIYAPSNLASGVPARFSGSGSGTSYSLTISRVEAEDAATYYCQQWSFNPPTFGAGTKLELKDGGGSGGGGSGGGGSSQAYLQQSGAESVRPGASVKMSCKASGYTFTSYNMHWVKQTPRQGLEWIGAIYPGNGDTSYNQKFKGKATLTVDKSSSTAYMQLSSLTSEDSAVYFCARVVYYSNSYWYFDVWGTGTTVTVSSDQEPKSSDKTHTSPPSSAPELLGGPSVFLFPPKPKDTLMISRNPEVTCVVVDVSHEDPEVKFNWYVDGVEVHNAKTKPREEQYNSTYRVVSVLTVLHQDWLNGKEYKCKVSNKALPAPIEKTISKAKGQPREPQVYTLPPSRDELTKNQVSLTCLVKGFYPSDIAVEWESNGQPENNYKTTPPVLDSDGSFFLYSKLTVDKSRWQQGNVFSCSVMHEALHNHYTQKSLSLSPGK

SEQ ID NO: 283 - DNA, 1521 bp, Artificial sequence
  Description of Artificial Sequence: Synthetic nucleotide sequence
aagcttgccgccatggattttcaagtgcagattttcagcttcctgctaatcagtgcttcagtcataattgccagaggacaaattgttctctcccagtctccagcaatcctgtctgcatctccaggggagaaggtcacaatgacttgcagggccagctcaagtgtaagttacatgcactggtaccagcagaagccaggatcctcccccaaaccctggatttatgccccatccaacctggcttctggagtccctgctcgcttcagtggcagtgggtctgggacctcttactctctcacaatcagcagagtggaggctgaagatgctgccacttattactgccagcagtggagttttaacccacccacgttcggtgctgggaccaagctggagctgaaagatggcggtggctcgggcggtggtggatctggaggaggtgggagctctcaggcttatctacagcagtctggggctgagtcggtgaggcctggggcctcagtgaagatgtcctgcaaggcttctggctacacatttaccagttacaatatgcactgggtaaagcagacacctagacagggcctggaatggattggagctatttatccaggaaatggtgatacttcctacaatcagaagttcaagggcaaggccacactgactgtagacaaatcctccagcacagcctacatgcagctcagcagcctgacatctgaagactctgcggtctatttctgtgcaagagtggtgtactatagtaactcttactggtacttcgatgtctggggcacagggaccacggtcaccgtctcttctgatcaggagcccaaatcttgtgacaaaactcacacatccccaccgtcctcagcacctgaactcctggggggaccgtcagtcttcctcttccccccaaaacccaaggacaccctcatgatctcccggaaccctgaggtcacatgcgtggtggtggacgtgagccacgaagaccctgaggtcaagttcaactggtacgtggacggcgtggaggtgcataatgccaagacaaagccgcgggaggagcagtacaacagcacgtaccgtgtggtcagcgtcctcaccgtcctgcaccaggactggctgaatggcaaggagtacaagtgcaaggtctccaacaaagccctcccagcccccatcgagaaaacaatctccaaagccaaagggcagccccgagaaccacaggtgtacaccctgcccccatcccgggatgagctgaccaagaaccaggtcagcctgacctgcctggtcaaaggcttctatcccagcgacatcgccgtggagtgggagagcaatgggcagccggagaacaactacaagaccacgcctcccgtgctggactccgacggctccttcttcctctacagcaagctcaccgtggacaagagcaggtggcagcaggggaacgtcttctcatgctccgtgatgcatgaggctctgcacaaccactacacgcagaagagcctctccctgtctccgggtaaatgatctaga

SEQ ID NO: 284 - protein, 500 aa, Artificial sequence
  Description of Artificial Sequence: Synthetic amino acid sequence
MDFQVQIFSFLLISASVIIARGQIVLSQSPAILSASPGEKVTMTCRASSSVSYMHWYQQKPGSSPKPWIYAPSNLASGVPARFSGSGSGTSYSLTISRVEAEDAATYYCQQWSFNPPTFGAGTKLELKDGGGSGGGGSGGGGSSQAYLQQSGAESVRPGASVKMSCKASGYTFTSYNMHWVKQTPRQGLEWIGAIYPGNGDTSYNQKFKGKATLTVDKSSSTAYMQLSSLTSEDSAVYFCARVVYYSNSYWYFDVWGTGTTVTVSSDQEPKSCDKTHTSPPSSAPELLGGPSVFLFPPKPKDTLMISRNPEVTCVVVDVSHEDPEVKFNWYVDGVEVHNAKTKPREEQYNSTYRVVSVLTVLHQDWLNGKEYKCKVSNKALPAPIEKTISKAKGQPREPQVYTLPPSRDELTKNQVSLTCLVKGFYPSDIAVEWESNGQPENNYKTTPPVLDSDGSFFLYSKLTVDKSRWQQGNVFSCSVMHEALHNHYTQKSLSLSPGK

SEQ ID NO: 285 - DNA, 327 bp, Artificial sequence
  Description of Artificial Sequence: Synthetic nucleotide sequence
cctgaactcctggggggaccgtcagtcttcctcttccccccaaaacccaaggacaccctcatgatctcccagaacgctaaggtcacatgcgtggtggtggacgtgagccacgaagaccctgaggtcaagttcaactggtacgtggacggcgtggaggtgcataatgccaagacaaagccgcgggaggagcagtacaacagcacgtaccgtgtggtcagcgtcctcaccgtcctgcaccaggactggctgaatggcaaggagtacaagtgcaaggtctccaacaaagccctcccagcccccatcgagaaaacaatctccaaagccaaa

SEQ ID NO: 286 - protein, 109 aa, Artificial sequence
  Description of Artificial Sequence: Synthetic amino acid sequence
PELLGGPSVFLFPPKPKDTLMISQNAKVTCVVVDVSHEDPEVKFNWYVDGVEVHNAKTKPREEQYNSTYRVVSVLTVLHQDWLNGKEYKCKVSNKALPAPIEKTISKAK

SEQ ID NO: 287 - DNA, 657 bp, Artificial sequence
  Description of Artificial Sequence: Synthetic nucleotide sequence
cctgaactcctggggggaccgtcagtcttcctcttccccccaaaacccaaggacaccctcatgatctcccagaacgctaaggtcacatgcgtggtggtggacgtgagccacgaagaccctgaggtcaagttcaactggtacgtggacggcgtggaggtgcataatgccaagacaaagccgcgggaggagcagtacaacagcacgtaccgtgtggtcagcgtcctcaccgtcctgcaccaggactggctgaatggcaaggagtacaagtgcaaggtctccaacaaagccctcccagcccccatcgagaaaacaatctccaaagccaaagggcagccccgagaaccacaggtgtacaccctgcccccatcccgggatgagctgaccaagaaccaggtcagcctgacctgcctggtcaaaggcttctatcccagcgacatcgccgtggagtgggagagcaatgggcagccggagaacaactacaagaccacgcctcccgtgctggactccgacggctccttcttcctctacagcaagctcaccgtggacaagagcaggtggcagcaggggaacgtcttctcatgctccgtgatgcatgaggctctgcacaaccactacacgcagaagagcctctccctgtctccgggtaaatgatctaga

SEQ ID NO: 288 - protein, 216 aa, Artificial sequence
  Description of Artificial Sequence: Synthetic amino acid sequence
PELLGGPSVFLFPPKPKDTLMISQNAKVTCVVVDVSHEDPEVKFNWYVDGVEVHNAKTKPREEQYNSTYRVVSVLTVLHQDWLNGKEYKCKVSNKALPAPIEKTISKAKGQPREPQVYTLPPSRDELTKNQVSLTCLVKGFYPSDIAVEWESNGQPENNYKTTPPVLDSDGSFFLYSKLTVDKSRWQQGNVFSCSVMHEALHNHYTQKSLSLSPGK

SEQ ID NO: 289 - DNA, 1521 bp, Artificial sequence
  Description of Artificial Sequence: Synthetic nucleotide sequence
aagcttgccgccatggattttcaagtgcagattttcagcttcctgctaatcagtgcttcagtcataattgccagaggacaaattgttctctcccagtctccagcaatcctgtctgcatctccaggggagaaggtcacaatgacttgcagggccagctcaagtgtaagttacatgcactggtaccagcagaagccaggatcctcccccaaaccctggatttatgccccatccaacctggcttctggagtccctgctcgcttcagtggcagtgggtctgggacctcttactctctcacaatcagcagagtggaggctgaagatgctgccacttattactgccagcagtggagttttaacccacccacgttcggtgctgggaccaagctggagctgaaagatggcggtggctcgggcggtggtggatctggaggaggtgggagctctcaggcttatctacagcagtctggggctgagtcggtgaggcctggggcctcagtgaagatgtcctgcaaggcttctggctacacatttaccagttacaatatgcactgggtaaagcagacacctagacagggcctggaatggattggagctatttatccaggaaatggtgatacttcctacaatcagaagttcaagggcaaggccacactgactgtagacaaatcctccagcacagcctacatgcagctcagcagcctgacatctgaagactctgcggtctatttctgtgcaagagtggtgtactatagtaactcttactggtacttcgatgtctggggcacagggaccacggtcaccgtctcttctgatcaggagcccaaatcttctgacaaaactcacacatccccaccgtcctcagcacctgaactcctggggggaccgtcagtcttcctcttccccccaaaacccaaggacaccctcatgatctcccagaacgctaaggtcacatgcgtggtggtggacgtgagccacgaagaccctgaggtcaagttcaactggtacgtggacggcgtggaggtgcataatgccaagacaaagccgcgggaggagcagtacaacagcacgtaccgtgtggtcagcgtcctcaccgtcctgcaccaggactggctgaatggcaaggagtacaagtgcaaggtctccaacaaagccctcccagcccccatcgagaaaacaatctccaaagccaaagggcagccccgagaaccacaggtgtacaccctgcccccatcccgggatgagctgaccaagaaccaggtcagcctgacctgcctggtcaaaggcttctatcccagcgacatcgccgtggagtgggagagcaatgggcagccggagaacaactacaagaccacgcctcccgtgctggactccgacggctccttcttcctctacagcaagctcaccgtggacaagagcaggtggcagcaggggaacgtcttctcatgctccgtgatgcatgaggctctgcacaaccactacacgcagaagagcctctccctgtctccgggtaaatgatctaga

SEQ ID NO: 290 - protein, 500 aa, Artificial sequence
  Description of Artificial Sequence: Synthetic amino acid sequence
MDFQVQIFSFLLISASVIIARGQIVLSQSPAILSASPGEKVTMTCRASSSVSYMHWYQQKPGSSPKPWIYAPSNLASGVPARFSGSGSGTSYSLTISRVEAEDAATYYCQQWSFNPPTFGAGTKLELKDGGGSGGGGSGGGGSSQAYLQQSGAESVRPGASVKMSCKASGYTFTSYNMHWVKQTPRQGLEWIGAIYPGNGDTSYNQKFKGKATLTVDKSSSTAYMQLSSLTSEDSAVYFCARVVYYSNSYWYFDVWGTGTTVTVSSDQEPKSSDKTHTSPPSSAPELLGGPSVFLFPPKPKDTLMISQNAKVTCVVVDVSHEDPEVKFNWYVDGVEVHNAKTKPREEQYNSTYRVVSVLTVLHQDWLNGKEYKCKVSNKALPAPIEKTISKAKGQPREPQVYTLPPSRDELTKNQVSLTCLVKGFYPSDIAVEWESNGQPENNYKTTPPVLDSDGSFFLYSKLTVDKSRWQQGNVFSCSVMHEALHNHYTQKSLSLSPGK

SEQ ID NO: 291 - DNA, 1521 bp, Artificial sequence
  Description of Artificial Sequence: Synthetic nucleotide sequence
aagcttgccgccatggattttcaagtgcagattttcagcttcctgctaatcagtgcttcagtcataattgccagaggacaaattgttctctcccagtctccagcaatcctgtctgcatctccaggggagaaggtcacaatgacttgcagggccagctcaagtgtaagttacatgcactggtaccagcagaagccaggatcctcccccaaaccctggatttatgccccatccaacctggcttctggagtccctgctcgcttcagtggcagtgggtctgggacctcttactctctcacaatcagcagagtggaggctgaagatgctgccacttattactgccagcagtggagttttaacccacccacgttcggtgctgggaccaagctggagctgaaagatggcggtggctcgggcggtggtggatctggaggaggtgggagctctcaggcttatctacagcagtctggggctgagtcggtgaggcctggggcctcagtgaagatgtcctgcaaggcttctggctacacatttaccagttacaatatgcactgggtaaagcagacacctagacagggcctggaatggattggagctatttatccaggaaatggtgatacttcctacaatcagaagttcaagggcaaggccacactgactgtagacaaatcctccagcacagcctacatgcagctcagcagcctgacatctgaagactctgcggtctatttctgtgcaagagtggtgtactatagtaactcttactggtacttcgatgtctggggcacagggaccacggtcaccgtctcttctgatcaggagcccaaatcttgtgacaaaactcacacatccccaccgtcctcagcacctgaactcctggggggaccgtcagtcttcctcttccccccaaaacccaaggacaccctcatgatctcccagaacgctaaggtcacatgcgtggtggtggacgtgagccacgaagaccctgaggtcaagttcaactggtacgtggacggcgtggaggtgcataatgccaagacaaagccgcgggaggagcagtacaacagcacgtaccgtgtggtcagcgtcctcaccgtcctgcaccaggactggctgaatggcaaggagtacaagtgcaaggtctccaacaaagccctcccagcccccatcgagaaaacaatctccaaagccaaagggcagccccgagaaccacaggtgtacaccctgcccccatcccgggatgagctgaccaagaaccaggtcagcctgacctgcctggtcaaaggcttctatcccagcgacatcgccgtggagtgggagagcaatgggcagccggagaacaactacaagaccacgcctcccgtgctggactccgacggctccttcttcctctacagcaagctcaccgtggacaagagcaggtggcagcaggggaacgtcttctcatgctccgtgatgcatgaggctctgcacaaccactacacgcagaagagcctctccctgtctccgggtaaatgatctaga

SEQ ID NO: 292 - protein, 500 aa, Artificial sequence
  Description of Artificial Sequence: Synthetic amino acid sequence
MDFQVQIFSFLLISASVIIARGQIVLSQSPAILSASPGEKVTMTCRASSSVSYMHWYQQKPGSSPKPWIYAPSNLASGVPARFSGSGSGTSYSLTISRVEAEDAATYYCQQWSFNPPTFGAGTKLELKDGGGSGGGGSGGGGSSQAYLQQSGAESVRPGASVKMSCKASGYTFTSYNMHWVKQTPRQGLEWIGAIYPGNGDTSYNQKFKGKATLTVDKSSSTAYMQLSSLTSEDSAVYFCARVVYYSNSYWYFDVWGTGTTVTVSSDQEPKSCDKTHTSPPSSAPELLGGPSVFLFPPKPKDTLMISQNAKVTCVVVDVSHEDPEVKFNWYVDGVEVHNAKTKPREEQYNSTYRVVSVLTVLHQDWLNGKEYKCKVSNKALPAPIEKTISKAKGQPREPQVYTLPPSRDELTKNQVSLTCLVKGFYPSDIAVEWESNGQPENNYKTTPPVLDSDGSFFLYSKLTVDKSRWQQGNVFSCSVMHEALHNHYTQKSLSLSPGK

SEQ ID NO: 293 - DNA, 327 bp, Artificial sequence
  Description of Artificial Sequence: Synthetic nucleotide sequence
cctgaactcctggggggaccgtcagtcttcctcttccccccaaaacccaaggacaccctcatgatctcccggacccctgaggtcacatgcgtggtggtggacgtgagccacgaagaccctgaggtcaagttcaactggtacgtggacggcgtggaggtgcataatgccaagacacagccgcgggaggagcagtacaacagcacgtaccgtgtggtcagcgtcctcaccgtcctgcaccaggactggctgaatggcaaggagtacaagtgcaaggtctccaacaaagccctcccagcccccatcgagaaaacaatctccaaagccaaa

SEQ ID NO: 294 - protein, 109 aa, Artificial sequence
  Description of Artificial Sequence: Synthetic amino acid sequence
PELLGGPSVFLFPPKPKDTLMISRTPEVTCVVVDVSHEDPEVKFNWYVDGVEVHNAKTQPREEQYNSTYRVVSVLTVLHQDWLNGKEYKCKVSNKALPAPIEKTISKAK

SEQ ID NO: 295 - DNA, 657 bp, Artificial sequence
  Description of Artificial Sequence: Synthetic nucleotide sequence
cctgaactcctggggggaccgtcagtcttcctcttccccccaaaacccaaggacaccctcatgatctcccggacccctgaggtcacatgcgtggtggtggacgtgagccacgaagaccctgaggtcaagttcaactggtacgtggacggcgtggaggtgcataatgccaagacacagccgcgggaggagcagtacaacagcacgtaccgtgtggtcagcgtcctcaccgtcctgcaccaggactggctgaatggcaaggagtacaagtgcaaggtctccaacaaagccctcccagcccccatcgagaaaacaatctccaaagccaaagggcagccccgagaaccacaggtgtacaccctgcccccatcccgggatgagctgaccaagaaccaggtcagcctgacctgcctggtcaaaggcttctatcccagcgacatcgccgtggagtgggagagcaatgggcagccggagaacaactacaagaccacgcctcccgtgctggactccgacggctccttcttcctctacagcaagctcaccgtggacaagagcaggtggcagcaggggaacgtcttctcatgctccgtgatgcatgaggctctgcacaaccactacacgcagaagagcctctccctgtctccgggtaaatgatctaga

SEQ ID NO: 296 - protein, 216 aa, Artificial sequence
  Description of Artificial Sequence: Synthetic amino acid sequence
PELLGGPSVFLFPPKPKDTLMISRTPEVTCVVVDVSHEDPEVKFNWYVDGVEVHNAKTQPREEQYNSTYRVVSVLTVLHQDWLNGKEYKCKVSNKALPAPIEKTISKAKGQPREPQVYTLPPSRDELTKNQVSLTCLVKGFYPSDIAVEWESNGQPENNYKTTPPVLDSDGSFFLYSKLTVDKSRWQQGNVFSCSVMHEALHNHYTQKSLSLSPGK

SEQ ID NO: 297 - DNA, 1521 bp, Artificial sequence
  Description of Artificial Sequence: Synthetic nucleotide sequence
aagcttgccgccatggattttcaagtgcagattttcagcttcctgctaatcagtgcttcagtcataattgccagaggacaaattgttctctcccagtctccagcaatcctgtctgcatctccaggggagaaggtcacaatgacttgcagggccagctcaagtgtaagttacatgcactggtaccagcagaagccaggatcctcccccaaaccctggatttatgccccatccaacctggcttctggagtccctgctcgcttcagtggcagtgggtctgggacctcttactctctcacaatcagcagagtggaggctgaagatgctgccacttattactgccagcagtggagttttaacccacccacgttcggtgctgggaccaagctggagctgaaagatggcggtggctcgggcggtggtggatctggaggaggtgggagctctcaggcttatctacagcagtctggggctgagtcggtgaggcctggggcctcagtgaagatgtcctgcaaggcttctggctacacatttaccagttacaatatgcactgggtaaagcagacacctagacagggcctggaatggattggagctatttatccaggaaatggtgatacttcctacaatcagaagttcaagggcaaggccacactgactgtagacaaatcctccagcacagcctacatgcagctcagcagcctgacatctgaagactctgcggtctatttctgtgcaagagtggtgtactatagtaactcttactggtacttcgatgtctggggcacagggaccacggtcaccgtctcttctgatcaggagcccaaatcttctgacaaaactcacacatccccaccgtcctcagcacctgaactcctggggggaccgtcagtcttcctcttccccccaaaacccaaggacaccctcatgatctcccggacccctgaggtcacatgcgtggtggtggacgtgagccacgaagaccctgaggtcaagttcaactggtacgtggacggcgtggaggtgcataatgccaagacacagccgcgggaggagcagtacaacagcacgtaccgtgtggtcagcgtcctcaccgtcctgcaccaggactggctgaatggcaaggagtacaagtgcaaggtctccaacaaagccctcccagcccccatcgagaaaacaatctccaaagccaaagggcagccccgagaaccacaggtgtacaccctgcccccatcccgggatgagctgaccaagaaccaggtcagcctgacctgcctggtcaaaggcttctatcccagcgacatcgccgtggagtgggagagcaatgggcagccggagaacaactacaagaccacgcctcccgtgctggactccgacggctccttcttcctctacagcaagctcaccgtggacaagagcaggtggcagcaggggaacgtcttctcatgctccgtgatgcatgaggctctgcacaaccactacacgcagaagagcctctccctgtctccgggtaaatgatctaga

SEQ ID NO: 298 - protein, 500 aa, Artificial sequence
  Description of Artificial Sequence: Synthetic amino acid sequence
MDFQVQIFSFLLISASVIIARGQIVLSQSPAILSASPGEKVTMTCRASSSVSYMHWYQQKPGSSPKPWIYAPSNLASGVPARFSGSGSGTSYSLTISRVEAEDAATYYCQQWSFNPPTFGAGTKLELKDGGGSGGGGSGGGGSSQAYLQQSGAESVRPGASVKMSCKASGYTFTSYNMHWVKQTPRQGLEWIGAIYPGNGDTSYNQKFKGKATLTVDKSSSTAYMQLSSLTSEDSAVYFCARVVYYSNSYWYFDVWGTGTTVTVSSDQEPKSSDKTHTSPPSSAPELLGGPSVFLFPPKPKDTLMISRTPEVTCVVVDVSHEDPEVKFNWYVDGVEVHNAKTQPREEQYNSTYRVVSVLTVLHQDWLNGKEYKCKVSNKALPAPIEKTISKAKGQPREPQVYTLPPSRDELTKNQVSLTCLVKGFYPSDIAVEWESNGQPENNYKTTPPVLDSDGSFFLYSKLTVDKSRWQQGNVFSCSVMHEALHNHYTQKSLSLSPGK

SEQ ID NO: 299 - DNA, 1521 bp, Artificial sequence
  Description of Artificial Sequence: Synthetic nucleotide sequence
aagcttgccgccatggattttcaagtgcagattttcagcttcctgctaatcagtgcttcagtcataattgccagaggacaaattgttctctcccagtctccagcaatcctgtctgcatctccaggggagaaggtcacaatgacttgcagggccagctcaagtgtaagttacatgcactggtaccagcagaagccaggatcctcccccaaaccctggatttatgccccatccaacctggcttctggagtccctgctcgcttcagtggcagtgggtctgggacctcttactctctcacaatcagcagagtggaggctgaagatgctgccacttattactgccagcagtggagttttaacccacccacgttcggtgctgggaccaagctggagctgaaagatggcggtggctcgggcggtggtggatctggaggaggtgggagctctcaggcttatctacagcagtctggggctgagtcggtgaggcctggggcctcagtgaagatgtcctgcaaggcttctggctacacatttaccagttacaatatgcactgggtaaagcagacacctagacagggcctggaatggattggagctatttatccaggaaatggtgatacttcctacaatcagaagttcaagggcaaggccacactgactgtagacaaatcctccagcacagcctacatgcagctcagcagcctgacatctgaagactctgcggtctatttctgtgcaagagtggtgtactatagtaactcttactggtacttcgatgtctggggcacagggaccacggtcaccgtctcttctgatcaggagcccaaatcttgtgacaaaactcacacatccccaccgtcctcagcacctgaactcctggggggaccgtcagtcttcctcttccccccaaaacccaaggacaccctcatgatctcccggacccctgaggtcacatgcgtggtggtggacgtgagccacgaagaccctgaggtcaagttcaactggtacgtggacggcgtggaggtgcataatgccaagacacagccgcgggaggagcagtacaacagcacgtaccgtgtggtcagcgtcctcaccgtcctgcaccaggactggctgaatggcaaggagtacaagtgcaaggtctccaacaaagccctcccagcccccatcgagaaaacaatctccaaagccaaagggcagccccgagaaccacaggtgtacaccctgcccccatcccgggatgagctgaccaagaaccaggtcagcctgacctgcctggtcaaaggcttctatcccagcgacatcgccgtggagtgggagagcaatgggcagccggagaacaactacaagaccacgcctcccgtgctggactccgacggctccttcttcctctacagcaagctcaccgtggacaagagcaggtggcagcaggggaacgtcttctcatgctccgtgatgcatgaggctctgcacaaccactacacgcagaagagcctctccctgtctccgggtaaatgatctaga

SEQ ID NO: 300 - protein, 500 aa, Artificial sequence
  Description of Artificial Sequence: Synthetic amino acid sequence
MDFQVQIFSFLLISASVIIARGQIVLSQSPAILSASPGEKVTMTCRASSSVSYMHWYQQKPGSSPKPWIYAPSNLASGVPARFSGSGSGTSYSLTISRVEAEDAATYYCQQWSFNPPTFGAGTKLELKDGGGSGGGGSGGGGSSQAYLQQSGAESVRPGASVKMSCKASGYTFTSYNMHWVKQTPRQGLEWIGAIYPGNGDTSYNQKFKGKATLTVDKSSSTAYMQLSSLTSEDSAVYFCARVVYYSNSYWYFDVWGTGTTVTVSSDQEPKSCDKTHTSPPSSAPELLGGPSVFLFPPKPKDTLMISRTPEVTCVVVDVSHEDPEVKFNWYVDGVEVHNAKTQPREEQYNSTYRVVSVLTVLHQDWLNGKEYKCKVSNKALPAPIEKTISKAKGQPREPQVYTLPPSRDELTKNQVSLTCLVKGFYPSDIAVEWESNGQPENNYKTTPPVLDSDGSFFLYSKLTVDKSRWQQGNVFSCSVMHEALHNHYTQKSLSLSPGK

SEQ ID NO: 301 - DNA, 327 bp, Artificial sequence
  Description of Artificial Sequence: Synthetic nucleotide sequence
cctgaactcctggggggaccgtcagtcttcctcttccccccaaaacccaaggacaccctcatgatctcccggacccctgaggtcacatgcgtggtggtggacgtgagccacgaagaccctgaggtcaagttcaactggtacgtggacggcgtggaggtgcataatgccaagacaaagccgcgggaggagcagtacaacagcacgtaccgtgtggtcagcgtcctcaccgtcctgcaccaggactggctgaatggcaaggagtacaagtgcaaggtctccaacaaagccctcccagcccccatcgagaaaacaatctccaaacccaaa

SEQ ID NO: 302 - protein, 109 aa, Artificial sequence
  Description of Artificial Sequence: Synthetic amino acid sequence
PELLGGPSVFLFPPKPKDTLMISRTPEVTCVVVDVSHEDPEVKFNWYVDGVEVHNAKTKPREEQYNSTYRVVSVLTVLHQDWLNGKEYKCKVSNKALPAPIEKTISKPK

SEQ ID NO: 303 - DNA, 657 bp, Artificial sequence
  Description of Artificial Sequence: Synthetic nucleotide sequence
cctgaactcctggggggaccgtcagtcttcctcttccccccaaaacccaaggacaccctcatgatctcccggacccctgaggtcacatgcgtggtggtggacgtgagccacgaagaccctgaggtcaagttcaactggtacgtggacggcgtggaggtgcataatgccaagacaaagccgcgggaggagcagtacaacagcacgtaccgtgtggtcagcgtcctcaccgtcctgcaccaggactggctgaatggcaaggagtacaagtgcaaggtctccaacaaagccctcccagcccccatcgagaaaacaatctccaaacccaaagggcagccccgagaaccacaggtgtacaccctgcccccatcccgggatgagctgaccaagaaccaggtcagcctgacctgcctggtcaaaggcttctatcccagcgacatcgccgtggagtgggagagcaatgggcagccggagaacaactacaagaccacgcctcccgtgctggactccgacggctccttcttcctctacagcaagctcaccgtggacaagagcaggtggcagcaggggaacgtcttctcatgctccgtgatgcatgaggctctgcacaaccactacacgcagaagagcctctccctgtctccgggtaaatgatctaga

SEQ ID NO: 304 - protein, 216 aa, Artificial sequence
  Description of Artificial Sequence: Synthetic amino acid sequence
PELLGGPSVFLFPPKPKDTLMISRTPEVTCVVVDVSHEDPEVKFNWYVDGVEVHNAKTKPREEQYNSTYRVVSVLTVLHQDWLNGKEYKCKVSNKALPAPIEKTISKPKGQPREPQVYTLPPSRDELTKNQVSLTCLVKGFYPSDIAVEWESNGQPENNYKTTPPVLDSDGSFFLYSKLTVDKSRWQQGNVFSCSVMHEALHNHYTQKSLSLSPGK

SEQ ID NO: 305 - DNA, 1521 bp, Artificial sequence
  Description of Artificial Sequence: Synthetic nucleotide sequence
aagcttgccgccatggattttcaagtgcagattttcagcttcctgctaatcagtgcttcagtcataattgccagaggacaaattgttctctcccagtctccagcaatcctgtctgcatctccaggggagaaggtcacaatgacttgcagggccagctcaagtgtaagttacatgcactggtaccagcagaagccaggatcctcccccaaaccctggatttatgccccatccaacctggcttctggagtccctgctcgcttcagtggcagtgggtctgggacctcttactctctcacaatcagcagagtggaggctgaagatgctgccacttattactgccagcagtggagttttaacccacccacgttcggtgctgggaccaagctggagctgaaagatggcggtggctcgggcggtggtggatctggaggaggtgggagctctcaggcttatctacagcagtctggggctgagtcggtgaggcctggggcctcagtgaagatgtcctgcaaggcttctggctacacatttaccagttacaatatgcactgggtaaagcagacacctagacagggcctggaatggattggagctatttatccaggaaatggtgatacttcctacaatcagaagttcaagggcaaggccacactgactgtagacaaatcctccagcacagcctacatgcagctcagcagcctgacatctgaagactctgcggtctatttctgtgcaagagtggtgtactatagtaactcttactggtacttcgatgtctggggcacagggaccacggtcaccgtctcttctgatcaggagcccaaatcttctgacaaaactcacacatccccaccgtcctcagcacctgaactcctggggggaccgtcagtcttcctcttccccccaaaacccaaggacaccctcatgatctcccggacccctgaggtcacatgcgtggtggtggacgtgagccacgaagaccctgaggtcaagttcaactggtacgtggacggcgtggaggtgcataatgccaagacaaagccgcgggaggagcagtacaacagcacgtaccgtgtggtcagcgtcctcaccgtcctgcaccaggactggctgaatggcaaggagtacaagtgcaaggtctccaacaaagccctcccagcccccatcgagaaaacaatctccaaacccaaagggcagccccgagaaccacaggtgtacaccctgcccccatcccgggatgagctgaccaagaaccaggtcagcctgacctgcctggtcaaaggcttctatcccagcgacatcgccgtggagtgggagagcaatgggcagccggagaacaactacaagaccacgcctcccgtgctggactccgacggctccttcttcctctacagcaagctcaccgtggacaagagcaggtggcagcaggggaacgtcttctcatgctccgtgatgcatgaggctctgcacaaccactacacgcagaagagcctctccctgtctccgggtaaatgatctaga

SEQ ID NO: 306 - protein, 500 aa, Artificial sequence
  Description of Artificial Sequence: Synthetic amino acid sequence
MDFQVQIFSFLLISASVIIARGQIVLSQSPAILSASPGEKVTMTCRASSSVSYMHWYQQKPGSSPKPWIYAPSNLASGVPARFSGSGSGTSYSLTISRVEAEDAATYYCQQWSFNPPTFGAGTKLELKDGGGSGGGGSGGGGSSQAYLQQSGAESVRPGASVKMSCKASGYTFTSYNMHWVKQTPRQGLEWIGAIYPGNGDTSYNQKFKGKATLTVDKSSSTAYMQLSSLTSEDSAVYFCARVVYYSNSYWYFDVWGTGTTVTVSSDQEPKSSDKTHTSPPSSAPELLGGPSVFLFPPKPKDTLMISRTPEVTCVVVDVSHEDPEVKFNWYVDGVEVHNAKTKPREEQYNSTYRVVSVLTVLHQDWLNGKEYKCKVSNKALPAPIEKTISKPKGQPREPQVYTLPPSRDELTKNQVSLTCLVKGFYPSDIAVEWESNGQPENNYKTTPPVLDSDGSFFLYSKLTVDKSRWQQGNVFSCSVMHEALHNHYTQKSLSLSPGK

SEQ ID NO: 307 - DNA, 1521 bp, Artificial sequence
  Description of Artificial Sequence: Synthetic nucleotide sequence
aagcttgccgccatggattttcaagtgcagattttcagcttcctgctaatcagtgcttcagtcataattgccagaggacaaattgttctctcccagtctccagcaatcctgtctgcatctccaggggagaaggtcacaatgacttgcagggccagctcaagtgtaagttacatgcactggtaccagcagaagccaggatcctcccccaaaccctggatttatgccccatccaacctggcttctggagtccctgctcgcttcagtggcagtgggtctgggacctcttactctctcacaatcagcagagtggaggctgaagatgctgccacttattactgccagcagtggagttttaacccacccacgttcggtgctgggaccaagctggagctgaaagatggcggtggctcgggcggtggtggatctggaggaggtgggagctctcaggcttatctacagcagtctggggctgagtcggtgaggcctggggcctcagtgaagatgtcctgcaaggcttctggctacacatttaccagttacaatatgcactgggtaaagcagacacctagacagggcctggaatggattggagctatttatccaggaaatggtgatacttcctacaatcagaagttcaagggcaaggccacactgactgtagacaaatcctccagcacagcctacatgcagctcagcagcctgacatctgaagactctgcggtctatttctgtgcaagagtggtgtactatagtaactcttactggtacttcgatgtctggggcacagggaccacggtcaccgtctcttctgatcaggagcccaaatcttgtgacaaaactcacacatccccaccgtcctcagcacctgaactcctggggggaccgtcagtcttcctcttccccccaaaacccaaggacaccctcatgatctcccggacccctgaggtcacatgcgtggtggtggacgtgagccacgaagaccctgaggtcaagttcaactggtacgtggacggcgtggaggtgcataatgccaagacaaagccgcgggaggagcagtacaacagcacgtaccgtgtggtcagcgtcctcaccgtcctgcaccaggactggctgaatggcaaggagtacaagtgcaaggtctccaacaaagccctcccagcccccatcgagaaaacaatctccaaacccaaagggcagccccgagaaccacaggtgtacaccctgcccccatcccgggatgagctgaccaagaaccaggtcagcctgacctgcctggtcaaaggcttctatcccagcgacatcgccgtggagtgggagagcaatgggcagccggagaacaactacaagaccacgcctcccgtgctggactccgacggctccttcttcctctacagcaagctcaccgtggacaagagcaggtggcagcaggggaacgtcttctcatgctccgtgatgcatgaggctctgcacaaccactacacgcagaagagcctctccctgtctccgggtaaatgatctaga

SEQ ID NO: 308 - protein, 500 aa, Artificial sequence
  Description of Artificial Sequence: Synthetic amino acid sequence
MDFQVQIFSFLLISASVIIARGQIVLSQSPAILSASPGEKVTMTCRASSSVSYMHWYQQKPGSSPKPWIYAPSNLASGVPARFSGSGSGTSYSLTISRVEAEDAATYYCQQWSFNPPTFGAGTKLELKDGGGSGGGGSGGGGSSQAYLQQSGAESVRPGASVKMSCKASGYTFTSYNMHWVKQTPRQGLEWIGAIYPGNGDTSYNQKFKGKATLTVDKSSSTAYMQLSSLTSEDSAVYFCARVVYYSNSYWYFDVWGTGTTVTVSSDQEPKSCDKTHTSPPSSAPELLGGPSVFLFPPKPKDTLMISRTPEVTCVVVDVSHEDPEVKFNWYVDGVEVHNAKTKPREEQYNSTYRVVSVLTVLHQDWLNGKEYKCKVSNKALPAPIEKTISKPKGQPREPQVYTLPPSRDELTKNQVSLTCLVKGFYPSDIAVEWESNGQPENNYKTTPPVLDSDGSFFLYSKLTVDKSRWQQGNVFSCSVMHEALHNHYTQKSLSLSPGK

SEQ ID NO: 309 - DNA, 354 bp, Artificial sequence
  Description of Artificial Sequence: Synthetic nucleotide sequence
gcggtccagctgcagcagtctggacctgagctggaaaagcctggcgcttcagtgaagatttcctgcaaggcttctggttactcattcactggctacaatatgaactgggtgaagcagaataatggaaagagccttgagtggattggaaatattgatccttattatggtggtactacctacaaccggaagttcaagggcaaggccacattgactgtagacaaatcctccagcacagcctacatgcagctcaagagtctgacatctgaggactctgcagtctattactgtgcaagatcggtcggccctatggactactggggtcaaggaacctcagtcaccgtctcttctgatcag

SEQ ID NO: 310 - protein, 118 aa, Artificial sequence
  Description of Artificial Sequence: Synthetic amino acid sequence
AVQLQQSGPELEKPGASVKISCKASGYSFTGYNMNWVKQNNGKSLEWIGNIDPYYGGTTYNRKFKGKATLTVDKSSSTAYMQLKSLTSEDSAVYYCARSVGPMDYWGQGTSVTVSSDQ

SEQ ID NO: 311 - DNA, 441 bp, Artificial sequence
  Description of Artificial Sequence: Synthetic nucleotide sequence
aagcttgccgccatggtatccacagctcagttccttgggttgctgctgctgtggcttacaggtggcagatgtgacatccagatgactcagtctccagcctccctatctgcatctgtgggagagactgtcaccatcacatgtcgaacaagtgaaaatgtttacagttatttggcttggtatcagcagaaacagggaaaatctcctcagctcctggtctcttttgcaaaaaccttagcagaaggtgtgccatcaaggttcagtggcagtggatcaggcacacagttttctctgaagatcagcagcctgcagcctgaagattctggaagttatttctgtcaacatcattccgataatccgtggacgttcggtggaggcaccgaactggagatcaaaggtggcggtggctcgggcggtggtgggtcgggtggcggcggatcgtca

SEQ ID NO: 312 - protein, 143 aa, Artificial sequence
  Description of Artificial Sequence: Synthetic amino acid sequence
MVSTAQFLGLLLLWLTGGRCDIQMTQSPASLSASVGETVTITCRTSENVYSYLAWYQQKQGKSPQLLVSFAKTLAEGVPSRFSGSGSGTQFSLKISSLQPEDSGSYFCQHHSDNPWTFGGGTELEIKGGGGSGGGGSGGGGSS

SEQ ID NO: 313 - DNA, 795 bp, Artificial sequence
  Description of Artificial Sequence: Synthetic nucleotide sequence
aagcttgccgccatggtatccacagctcagttccttgggttgctgctgctgtggcttacaggtggcagatgtgacatccagatgactcagtctccagcctccctatctgcatctgtgggagagactgtcaccatcacatgtcgaacaagtgaaaatgtttacagttatttggcttggtatcagcagaaacagggaaaatctcctcagctcctggtctcttttgcaaaaaccttagcagaaggtgtgccatcaaggttcagtggcagtggatcaggcacacagttttctctgaagatcagcagcctgcagcctgaagattctggaagttatttctgtcaacatcattccgataatccgtggacgttcggtggaggcaccgaactggagatcaaaggtggcggtggctcgggcggtggtgggtcgggtggcggcggatcgtcagcggtccagctgcagcagtctggacctgagctggaaaagcctggcgcttcagtgaagatttcctgcaaggcttctggttactcattcactggctacaatatgaactgggtgaagcagaataatggaaagagccttgagtggattggaaatattgatccttattatggtggtactacctacaaccggaagttcaagggcaaggccacattgactgtagacaaatcctccagcacagcctacatgcagctcaagagtctgacatctgaggactctgcagtctattactgtgcaagatcggtcggccctatggactactggggtcaaggaacctcagtcaccgtctcttctgatcag

SEQ ID NO: 314 - protein, 261 aa, Artificial sequence
  Description of Artificial Sequence: Synthetic amino acid sequence
MVSTAQFLGLLLLWLTGGRCDIQMTQSPASLSASVGETVTITCRTSENVYSYLAWYQQKQGKSPQLLVSFAKTLAEGVPSRFSGSGSGTQFSLKISSLQPEDSGSYFCQHHSDNPWTFGGGTELEIKGGGGSGGGGSGGGGSSAVQLQQSGPELEKPGASVKISCKASGYSFTGYNMNWVKQNNGKSLEWIGNIDPYYGGTTYNRKFKGKATLTVDKSSSTAYMQLKSLTSEDSAVYYCARSVGPMDYWGQGTSVTVSSDQ

SEQ ID NO: 315 - DNA, 354 bp, Artificial sequence
  Description of Artificial Sequence: Synthetic nucleotide sequence
gcggtccagctgcagcagtctggacctgagtcggaaaagcctggcgcttcagtgaagatttcctgcaaggcttctggttactcattcactggctacaatatgaactgggtgaagcagaataatggaaagagccttgagtggattggaaatattgatccttattatggtggtactacctacaaccggaagttcaagggcaaggccacattgactgtagacaaatcctccagcacagcctacatgcagctcaagagtctgacatctgaggactctgcagtctattactgtgcaagatcggtcggccctatggactactggggtcaaggaacctcagtcaccgtctcttctgatcag

SEQ ID NO: 316 - protein, 118 aa, Artificial sequence
  Description of Artificial Sequence: Synthetic amino acid sequence
AVQLQQSGPESEKPGASVKISCKASGYSFTGYNMNWVKQNNGKSLEWIGNIDPYYGGTTYNRKFKGKATLTVDKSSSTAYMQLKSLTSEDSAVYYCARSVGPMDYWGQGTSVTVSSDQ

SEQ ID NO: 317 - DNA, 795 bp, Artificial sequence
  Description of Artificial Sequence: Synthetic nucleotide sequence
aagcttgccgccatggtatccacagctcagttccttgggttgctgctgctgtggcttacaggtggcagatgtgacatccagatgactcagtctccagcctccctatctgcatctgtgggagagactgtcaccatcacatgtcgaacaagtgaaaatgtttacagttatttggcttggtatcagcagaaacagggaaaatctcctcagctcctggtctcttttgcaaaaaccttagcagaaggtgtgccatcaaggttcagtggcagtggatcaggcacacagttttctctgaagatcagcagcctgcagcctgaagattctggaagttatttctgtcaacatcattccgataatccgtggacgttcggtggaggcaccgaactggagatcaaaggtggcggtggctcgggcggtggtgggtcgggtggcggcggatcgtcagcggtccagctgcagcagtctggacctgagtcggaaaagcctggcgcttcagtgaagatttcctgcaaggcttctggttactcattcactggctacaatatgaactgggtgaagcagaataatggaaagagccttgagtggattggaaatattgatccttattatggtggtactacctacaaccggaagttcaagggcaaggccacattgactgtagacaaatcctccagcacagcctacatgcagctcaagagtctgacatctgaggactctgcagtctattactgtgcaagatcggtcggccctatggactactggggtcaaggaacctcagtcaccgtctcttctgatcag

SEQ ID NO: 318 - protein, 261 aa, Artificial sequence
  Description of Artificial Sequence: Synthetic amino acid sequence
MVSTAQFLGLLLLWLTGGRCDIQMTQSPASLSASVGETVTITCRTSENVYSYLAWYQQKQGKSPQLLVSFAKTLAEGVPSRFSGSGSGTQFSLKISSLQPEDSGSYFCQHHSDNPWTFGGGTELEIKGGGGSGGGGSGGGGSSAVQLQQSGPESEKPGASVKISCKASGYSFTGYNMNWVKQNNGKSLEWIGNIDPYYGGTTYNRKFKGKATLTVDKSSSTAYMQLKSLTSEDSAVYYCARSVGPMDYWGQGTSVTVSSDQ

SEQ ID NO: 319 - DNA, 1506 bp, Artificial sequence
  Description of Artificial Sequence: Synthetic nucleotide sequence
aagcttgccgccatggtatccacagctcagttccttgggttgctgctgctgtggcttacaggtggcagatgtgacatccagatgactcagtctccagcctccctatctgcatctgtgggagagactgtcaccatcacatgtcgaacaagtgaaaatgtttacagttatttggcttggtatcagcagaaacagggaaaatctcctcagctcctggtctcttttgcaaaaaccttagcagaaggtgtgccatcaaggttcagtggcagtggatcaggcacacagttttctctgaagatcagcagcctgcagcctgaagattctggaagttatttctgtcaacatcattccgataatccgtggacgttcggtggaggcaccgaactggagatcaaaggtggcggtggctcgggcggtggtgggtcgggtggcggcggatcgtcagcggtccagctgcagcagtctggacctgagctggaaaagcctggcgcttcagtgaagatttcctgcaaggcttctggttactcattcactggctacaatatgaactgggtgaagcagaataatggaaagagccttgagtggattggaaatattgatccttattatggtggtactacctacaaccggaagttcaagggcaaggccacattgactgtagacaaatcctccagcacagcctacatgcagctcaagagtctgacatctgaggactctgcagtctattactgtgcaagatcggtcggccctatggactactggggtcaaggaacctcagtcaccgtctcttctgatcatgatcaggagcccaaatcttctgacaaaactcacacatccccaccgtcctcagcacctgaactcctggggggaccgtcagtcttcctcttccccccaaaacccaaggacaccctcatgatctcccggacccctgaggtcacatgcgtggtggtggacgtgagccacgaagaccctgaggtcaagttcaactggtacgtggacggcgtggaggtgcataatgccaagacaaagccgcgggaggagcagtacaacagcacgtaccgtgtggtcagcgtcctcaccgtcctgcaccaggactggctgaatggcaaggagtacaagtgcaaggtctccaacaaagccctcccagcccccatcgagaaaacaatctccaaagccaaagggcagccccgagaaccacaggtgtacaccctgcccccatcccgggatgagctgaccaagaaccaggtcagcctgacctgcctggtcaaaggcttctatcccagcgacatcgccgtggagtgggagagcaatgggcagccggagaacaactacaagaccacgcctcccgtgctggactccgacggctccttcttcctctacagcaagctcaccgtggacaagagcaggtggcagcaggggaacgtcttctcatgctccgtgatgcatgaggctctgcacaaccactacacgcagaagagcctctccctgtctccgggtaaatgatctaga

SEQ ID NO: 320 - protein, 495 aa, Artificial sequence
  Description of Artificial Sequence: Synthetic amino acid sequence
MVSTAQFLGLLLLWLTGGRCDIQMTQSPASLSASVGETVTITCRTSENVYSYLAWYQQKQGKSPQLLVSFAKTLAEGVPSRFSGSGSGTQFSLKISSLQPEDSGSYFCQHHSDNPWTFGGGTELEIKGGGGSGGGGSGGGGSSAVQLQQSGPELEKPGASVKISCKASGYSFTGYNMNWVKQNNGKSLEWIGNIDPYYGGTTYNRKFKGKATLTVDKSSSTAYMQLKSLTSEDSAVYYCARSVGPMDYWGQGTSVTVSSDHDQEPKSSDKTHTSPPSSAPELLGGPSVFLFPPKPKDTLMISRTPEVTCVVVDVSHEDPEVKFNWYVDGVEVHNAKTKPREEQYNSTYRVVSVLTVLHQDWLNGKEYKCKVSNKALPAPIEKTISKAKGQPREPQVYTLPPSRDELTKNQVSLTCLVKGFYPSDIAVEWESNGQPENNYKTTPPVLDSDGSFFLYSKLTVDKSRWQQGNVFSCSVMHEALHNHYTQKSLSLSPGK

SEQ ID NO: 321 - DNA, 1518 bp, Artificial sequence
  Description of Artificial Sequence: Synthetic nucleotide sequence
aagcttgccgccatggtatccacagctcagttccttgggttgctgctgctgtggcttacaggtggcagatgtgacatccagatgactcagtctccagcctccctatctgcatctgtgggagagactgtcaccatcacatgtcgaacaagtgaaaatgtttacagttatttggcttggtatcagcagaaacagggaaaatctcctcagctcctggtctcttttgcaaaaaccttagcagaaggtgtgccatcaaggttcagtggcagtggatcaggcacacagttttctctgaagatcagcagcctgcagcctgaagattctggaagttatttctgtcaacatcattccgataatccgtggacgttcggtggaggcaccgaactggagatcaaaggtggcggtggctcgggcggtggtgggtcgggtggcggcggatcgtcagcggtccagctgcagcagtctggacctgagctggaaaagcctggcgcttcagtgaagatttcctgcaaggcttctggttactcattcactggctacaatatgaactgggtgaagcagaataatggaaagagccttgagtggattggaaatattgatccttattatggtggtactacctacaaccggaagttcaagggcaaggccacattgactgtagacaaatcctccagcacagcctacatgcagctcaagagtctgacatctgaggactctgcagtctattactgtgcaagatcggtcggccctatggactactggggtcaaggaacctcagtcaccgtctcttctgatcagccagttccctcaactccacctaccccatctccctcaactccacctaccccatctccctcatgcgcacctgaactcctggggggaccgtcagtcttcctcttccccccaaaacccaaggacaccctcatgatctcccggacccctgaggtcacatgcgtggtggtggacgtgagccacgaagaccctgaggtcaagttcaactggtacgtggacggcgtggaggtgcataatgccaagacaaagccgcgggaggagcagtacaacagcacgtaccgtgtggtcagcgtcctcaccgtcctgcaccaggactggctgaatggcaaggagtacaagtgcaaggtctccaacaaagccctcccagcccccatcgagaaaacaatctccaaagccaaagggcagccccgagaaccacaggtgtacaccctgcccccatcccgggatgagctgaccaagaaccaggtcagcctgacctgcctggtcaaaggcttctatcccagcgacatcgccgtggagtgggagagcaatgggcagccggagaacaactacaagaccacgcctcccgtgctggactccgacggctccttcttcctctacagcaagctcaccgtggacaagagcaggtggcagcaggggaacgtcttctcatgctccgtgatgcatgaggctctgcacaaccactacacgcagaagagcctctccctgtctccgggtaaatgatctaga

SEQ ID NO: 322 - protein, 499 aa, Artificial sequence
  Description of Artificial Sequence: Synthetic amino acid sequence
MVSTAQFLGLLLLWLTGGRCDIQMTQSPASLSASVGETVTITCRTSENVYSYLAWYQQKQGKSPQLLVSFAKTLAEGVPSRFSGSGSGTQFSLKISSLQPEDSGSYFCQHHSDNPWTFGGGTELEIKGGGGSGGGGSGGGGSSAVQLQQSGPELEKPGASVKISCKASGYSFTGYNMNWVKQNNGKSLEWIGNIDPYYGGTTYNRKFKGKATLTVDKSSSTAYMQLKSLTSEDSAVYYCARSVGPMDYWGQGTSVTVSSDQPVPSTPPTPSPSTPPTPSPSCAPELLGGPSVFLFPPKPKDTLMISRTPEVTCVVVDVSHEDPEVKFNWYVDGVEVHNAKTKPREEQYNSTYRVVSVLTVLHQDWLNGKEYKCKVSNKALPAPIEKTISKAKGQPREPQVYTLPPSRDELTKNQVSLTCLVKGFYPSDIAVEWESNGQPENNYKTTPPVLDSDGSFFLYSKLTVDKSRWQQGNVFSCSVMHEALHNHYTQKSLSLSPGK

SEQ ID NO: 323 - DNA, 1500 bp, Artificial sequence
  Description of Artificial Sequence: Synthetic nucleotide sequence
aagcttgccgccatggtatccacagctcagttccttgggttgctgctgctgtggcttacaggtggcagatgtgacatccagatgactcagtctccagcctccctatctgcatctgtgggagagactgtcaccatcacatgtcgaacaagtgaaaatgtttacagttatttggcttggtatcagcagaaacagggaaaatctcctcagctcctggtctcttttgcaaaaaccttagcagaaggtgtgccatcaaggttcagtggcagtggatcaggcacacagttttctctgaagatcagcagcctgcagcctgaagattctggaagttatttctgtcaacatcattccgataatccgtggacgttcggtggaggcaccgaactggagatcaaaggtggcggtggctcgggcggtggtgggtcgggtggcggcggatcgtcagcggtccagctgcagcagtctggacctgagtcggaaaagcctggcgcttcagtgaagatttcctgcaaggcttctggttactcattcactggctacaatatgaactgggtgaagcagaataatggaaagagccttgagtggattggaaatattgatccttattatggtggtactacctacaaccggaagttcaagggcaaggccacattgactgtagacaaatcctccagcacagcctacatgcagctcaagagtctgacatctgaggactctgcagtctattactgtgcaagatcggtcggccctatggactactggggtcaaggaacctcagtcaccgtctcttctgatcaggagcccaaatcttctgacaaaactcacacatccccaccgtcctcagcacctgaactcctggggggaccgtcagtcttcctcttccccccaaaacccaaggacaccctcatgatctcccggacccctgaggtcacatgcgtggtggtggacgtgagccacgaagaccctgaggtcaagttcaactggtacgtggacggcgtggaggtgcataatgccaagacaaagccgcgggaggagcagtacaacagcacgtaccgtgtggtcagcgtcctcaccgtcctgcaccaggactggctgaatggcaaggagtacaagtgcaaggtctccaacaaagccctcccagcccccatcgagaaaacaatctccaaagccaaagggcagccccgagaaccacaggtgtacaccctgcccccatcccgggatgagctgaccaagaaccaggtcagcctgacctgcctggtcaaaggcttctatcccagcgacatcgccgtggagtgggagagcaatgggcagccggagaacaactacaagaccacgcctcccgtgctggactccgacggctccttcttcctctacagcaagctcaccgtggacaagagcaggtggcagcaggggaacgtcttctcatgctccgtgatgcatgaggctctgcacaaccactacacgcagaagagcctctccctgtctccgggtaaatgatctaga

SEQ ID NO: 324 - protein, 495 aa, Artificial sequence
  Description of Artificial Sequence: Synthetic amino acid sequence
MVSTAQFLGLLLLWLTGGRCDIQMTQSPASLSASVGETVTITCRTSENVYSYLAWYQQKQGKSPQLLVSFAKTLAEGVPSRFSGSGSGTQFSLKISSLQPEDSGSYFCQHHSDNPWTFGGGTELEIKGGGGSGGGGSGGGGSSAVQLQQSGPESEKPGASVKISCKASGYSFTGYNMNWVKQNNGKSLEWIGNIDPYYGGTTYNRKFKGKATLTVDKSSSTAYMQLKSLTSEDSAVYYCARSVGPMDYWGQGTSVTVSSDHDQEPKSSDKTHTSPPSSAPELLGGPSVFLFPPKPKDTLMISRTPEVTCVVVDVSHEDPEVKFNWYVDGVEVHNAKTKPREEQYNSTYRVVSVLTVLHQDWLNGKEYKCKVSNKALPAPIEKTISKAKGQPREPQVYTLPPSRDELTKNQVSLTCLVKGFYPSDIAVEWESNGQPENNYKTTPPVLDSDGSFFLYSKLTVDKSRWQQGNVFSCSVMHEALHNHYTQKSLSLSPGK

SEQ ID NO: 325 - DNA, 1500 bp, Artificial sequence
  Description of Artificial Sequence: Synthetic nucleotide sequence
aagcttgccgccatggtatccacagctcagttccttgggttgctgctgctgtggcttacaggtggcagatgtgacatccagatgactcagtctccagcctccctatctgcatctgtgggagagactgtcaccatcacatgtcgaacaagtgaaaatgtttacagttatttggcttggtatcagcagaaacagggaaaatctcctcagctcctggtctcttttgcaaaaaccttagcagaaggtgtgccatcaaggttcagtggcagtggatcaggcacacagttttctctgaagatcagcagcctgcagcctgaagattctggaagttatttctgtcaacatcattccgataatccgtggacgttcggtggaggcaccgaactggagatcaaaggtggcggtggctcgggcggtggtgggtcgggtggcggcggatcgtcagcggtccagctgcagcagtctggacctgagtcggaaaagcctggcgcttcagtgaagatttcctgcaaggcttctggttactcattcactggctacaatatgaactgggtgaagcagaataatggaaagagccttgagtggattggaaatattgatccttattatggtggtactacctacaaccggaagttcaagggcaaggccacattgactgtagacaaatcctccagcacagcctacatgcagctcaagagtctgacatctgaggactctgcagtctattactgtgcaagatcggtcggccctatggactactggggtcaaggaacctcagtcaccgtctcttctgatcaggagcccaaatcttgtgacaaaactcacacatccccaccgtcctcagcacctgaactcctggggggaccgtcagtcttcctcttccccccaaaacccaaggacaccctcatgatctcccggacccctgaggtcacatgcgtggtggtggacgtgagccacgaagaccctgaggtcaagttcaactggtacgtggacggcgtggaggtgcataatgccaagacaaagccgcgggaggagcagtacaacagcacgtaccgtgtggtcagcgtcctcaccgtcctgcaccaggactggctgaatggcaaggagtacaagtgcaaggtctccaacaaagccctcccagcccccatcgagaaaacaatctccaaagccaaagggcagccccgagaaccacaggtgtacaccctgcccccatcccgggatgagctgaccaagaaccaggtcagcctgacctgcctggtcaaaggcttctatcccagcgacatcgccgtggagtgggagagcaatgggcagccggagaacaactacaagaccacgcctcccgtgctggactccgacggctccttcttcctctacagcaagctcaccgtggacaagagcaggtggcagcaggggaacgtcttctcatgctccgtgatgcatgaggctctgcacaaccactacacgcagaagagcctctccctgtctccgggtaaatgatctaga

SEQ ID NO: 326 - protein, 493 aa, Artificial sequence
  Description of Artificial Sequence: Synthetic amino acid sequence
MVSTAQFLGLLLLWLTGGRCDIQMTQSPASLSASVGETVTITCRTSENVYSYLAWYQQKQGKSPQLLVSFAKTLAEGVPSRFSGSGSGTQFSLKISSLQPEDSGSYFCQHHSDNPWTFGGGTELEIKGGGGSGGGGSGGGGSSAVQLQQSGPESEKPGASVKISCKASGYSFTGYNMNWVKQNNGKSLEWIGNIDPYYGGTTYNRKFKGKATLTVDKSSSTAYMQLKSLTSEDSAVYYCARSVGPMDYWGQGTSVTVSSDQEPKSCDKTHTSPPSSAPELLGGPSVFLFPPKPKDTLMISRTPEVTCVVVDVSHEDPEVKFNWYVDGVEVHNAKTKPREEQYNSTYRVVSVLTVLHQDWLNGKEYKCKVSNKALPAPIEKTISKAKGQPREPQVYTLPPSRDELTKNQVSLTCLVKGFYPSDIAVEWESNGQPENNYKTTPPVLDSDGSFFLYSKLTVDKSRWQQGNVFSCSVMHEALHNHYTQKSLSLSPGK

SEQ ID NO: 327 - DNA, 1500 bp, Artificial sequence
  Description of Artificial Sequence: Synthetic nucleotide sequence
aagcttgccgccatggtatccacagctcagttccttgggttgctgctgctgtggcttacaggtggcagatgtgacatccagatgactcagtctccagcctccctatctgcatctgtgggagagactgtcaccatcacatgtcgaacaagtgaaaatgtttacagttatttggcttggtatcagcagaaacagggaaaatctcctcagctcctggtctcttttgcaaaaaccttagcagaaggtgtgccatcaaggttcagtggcagtggatcaggcacacagttttctctgaagatcagcagcctgcagcctgaagattctggaagttatttctgtcaacatcattccgataatccgtggacgttcggtggaggcaccgaactggagatcaaaggtggcggtggctcgggcggtggtgggtcgggtggcggcggatcgtcagcggtccagctgcagcagtctggacctgagtcggaaaagcctggcgcttcagtgaagatttcctgcaaggcttctggttactcattcactggctacaatatgaactgggtgaagcagaataatggaaagagccttgagtggattggaaatattgatccttattatggtggtactacctacaaccggaagttcaagggcaaggccacattgactgtagacaaatcctccagcacagcctacatgcagctcaagagtctgacatctgaggactctgcagtctattactgtgcaagatcggtcggccctatggactactggggtcaaggaacctcagtcaccgtctcttctgatcaggagcccaaatcttgtgacaaaactcacacatctccaccgtgctcagcacctgaactcctgggtggaccgtcagtcttcctcttccccccaaaacccaaggacaccctcatgatctcccggacccctgaggtcacatgcgtggtggtggacgtgagccacgaagaccctgaggtcaagttcaactggtacgtggacggcgtggaggtgcataatgccaagacaaagccgcgggaggagcagtacaacagcacgtaccgtgtggtcagcgtcctcaccgtcctgcaccaggactggctgaatggcaaggagtacaagtgcaaggtctccaacaaagccctcccagcccccatcgagaaaacaatctccaaagccaaagggcagccccgagaaccacaggtgtacaccctgcccccatcccgggatgagctgaccaagaaccaggtcagcctgacctgcctggtcaaaggcttctatccaagcgacatcgccgtggagtgggagagcaatgggcagccggagaacaactacaagaccacgcctcccgtgctggactccgacggctccttcttcctctacagcaagctcaccgtggacaagagcaggtggcagcaggggaacgtcttctcatgctccgtgatgcatgaggctctgcacaaccactacacgcagaagagcctctccctgtctccgggtaaatgatctaga

SEQ ID NO: 328 - protein, 493 aa, Artificial sequence
  Description of Artificial Sequence: Synthetic amino acid sequence
MVSTAQFLGLLLLWLTGGRCDIQMTQSPASLSASVGETVTITCRTSENVYSYLAWYQQKQGKSPQLLVSFAKTLAEGVPSRFSGSGSGTQFSLKISSLQPEDSGSYFCQHHSDNPWTFGGGTELEIKGGGGSGGGGSGGGGSSAVQLQQSGPESEKPGASVKISCKASGYSFTGYNMNWVKQNNGKSLEWIGNIDPYYGGTTYNRKFKGKATLTVDKSSSTAYMQLKSLTSEDSAVYYCARSVGPMDYWGQGTSVTVSSDQEPKSCDKTHTSPPCSAPELLGGPSVFLFPPKPKDTLMISRTPEVTCVVVDVSHEDPEVKFNWYVDGVEVHNAKTKPREEQYNSTYRVVSVLTVLHQDWLNGKEYKCKVSNKALPAPIEKTISKAKGQPREPQVYTLPPSRDELTKNQVSLTCLVKGFYPSDIAVEWESNGQPENNYKTTPPVLDSDGSFFLYSKLTVDKSRWQQGNVFSCSVMHEALHNHYTQKSLSLSPGK

SEQ ID NO: 329 - DNA, 1500 bp, Artificial sequence
  Description of Artificial Sequence: Synthetic nucleotide sequence
aagcttgccgccatggtatccacagctcagttccttgggttgctgctgctgtggcttacaggtggcagatgtgacatccagatgactcagtctccagcctccctatctgcatctgtgggagagactgtcaccatcacatgtcgaacaagtgaaaatgtttacagttatttggcttggtatcagcagaaacagggaaaatctcctcagctcctggtctcttttgcaaaaaccttagcagaaggtgtgccatcaaggttcagtggcagtggatcaggcacacagttttctctgaagatcagcagcctgcagcctgaagattctggaagttatttctgtcaacatcattccgataatccgtggacgttcggtggaggcaccgaactggagatcaaaggtggcggtggctcgggcggtggtgggtcgggtggcggcggatcgtcagcggtccagctgcagcagtctggacctgagtcggaaaagcctggcgcttcagtgaagatttcctgcaaggcttctggttactcattcactggctacaatatgaactgggtgaagcagaataatggaaagagccttgagtggattggaaatattgatccttattatggtggtactacctacaaccggaagttcaagggcaaggccacattgactgtagacaaatcctccagcacagcctacatgcagctcaagagtctgacatctgaggactctgcagtctattactgtgcaagatcggtcggccctatggactactggggtcaaggaacctcagtcaccgtctcttctgatcaggagcccaaatcttctgacaaaactcacacatccccaccgtgcccagcacctgaactcctggggggaccgtcagtcttcctcttccccccaaaacccaaggacaccctcatgatctcccggacccctgaggtcacatgcgtggtggtggacgtgagccacgaagaccctgaggtcaagttcaactggtacgtggacggcgtggaggtgcataatgccaagacaaagccgcgggaggagcagtacaacagcacgtaccgtgtggtcagcgtcctcaccgtcctgcaccaggactggctgaatggcaaggagtacaagtgcaaggtctccaacaaagccctcccagcccccatcgagaaaacaatctccaaagccaaagggcagccccgagaaccacaggtgtacaccctgcccccatcccgggatgagctgaccaagaaccaggtcagcctgacctgcctggtcaaaggcttctatcccagcgacatcgccgtggagtgggagagcaatgggcagccggagaacaactacaagaccacgcctcccgtgctggactccgacggctccttcttcctctacagcaagctcaccgtggacaagagcaggtggcagcaggggaacgtcttctcatgctccgtgatgcatgaggctctgcacaaccactacacgcagaagagcctctccctgtctccgggtaaatgatctaga

SEQ ID NO: 330 - protein, 493 aa, Artificial sequence
  Description of Artificial Sequence: Synthetic amino acid sequence
MVSTAQFLGLLLLWLTGGRCDIQMTQSPASLSASVGETVTITCRTSENVYSYLAWYQQKQGKSPQLLVSFAKTLAEGVPSRFSGSGSGTQFSLKISSLQPEDSGSYFCQHHSDNPWTFGGGTELEIKGGGGSGGGGSGGGGSSAVQLQQSGPESEKPGASVKISCKASGYSFTGYNMNWVKQNNGKSLEWIGNIDPYYGGTTYNRKFKGKATLTVDKSSSTAYMQLKSLTSEDSAVYYCARSVGPMDYWGQGTSVTVSSDQEPKSSDKTHTSPPCPAPELLGGPSVFLFPPKPKDTLMISRTPEVTCVVVDVSHEDPEVKFNWYVDGVEVHNAKTKPREEQYNSTYRVVSVLTVLHQDWLNGKEYKCKVSNKALPAPIEKTISKAKGQPREPQVYTLPPSRDELTKNQVSLTCLVKGFYPSDIAVEWESNGQPENNYKTTPPVLDSDGSFFLYSKLTVDKSRWQQGNVFSCSVMHEALHNHYTQKSLSLSPGK

SEQ ID NO: 331 - DNA, 1182 bp, Artificial sequence
  Description of Artificial Sequence: Synthetic nucleotide sequence
atggcttgccttggatttcagcggcacaaggctcagctgaacctggctgccaggacctggccctgcactctcctgttttttcttctcttcatccctgtcttctgcaaagcaatgcacgtggcccagcctgctgtggtactggccagcagccgaggcatcgccagctttgtgtgtgagtatgcatctccaggcaaagccactgaggtccgggtgacagtgcttcggcaggctgacagccaggtgactgaagtctgtgcggcaacctacatgacggggaatgagttgaccttcctagatgattccatctgcacgggcacctccagtggaaatcaagtgaacctcactatccaaggactgagggccatggacacgggactctacatctgcaaggtggagctcatgtacccaccgccatactacctgggcataggcaacggaacccagatttatgtaattgatccagaaccgtgcccagattctgatcaacccaaatcttctgacaaaactcacacatccccaccgtcctcagcacctgaactcctggggggatcgtcagtcttcctcttccccccaaaacccaaggacaccctcatgatctcccggacccctgaggtcacatgcgtggtggtggacgtgagccacgaagaccctgaggtcaagttcaactggtacgtggacggcgtggaggtgcataatgccaagacaaagccgcgggaggagcagtacaacagcacgtaccgtgtggtcagcgtcctcaccgtcctgcaccaggactggctgaatggcaaggagtacaagtgcaaggtctccaacaaagccctcccagcccccatcgagaaaacaatctccaaagccaaagggcagccccgagaaccacaggtgtacaccctgcccccatcccgggatgagctgaccaagaaccaggtcagcctgacctgcctggtcaaaggcttctatcccagcgacatcgccgtggagtgggagagcaatgggcagccggagaacaactacaagaccacgcctcccgtgctggactccgacggctccttcttcctctacagcaagctcaccgtggacaagagcaggtggcagcaggggaacgtcttctcatgctccgtgatgcatgaggctctgcacaaccactacacgcagaagagcctctccctgtctccgggtaaatga

SEQ ID NO: 332 - protein, 393 aa, Artificial sequence
  Description of Artificial Sequence: Synthetic amino acid sequence
MACLGFQRHKAQLNLAARTWPCTLLFFLLFIPVFCKAMHVAQPAVVLASSRGIASFVCEYASPGKATEVRVTVLRQADSQVTEVCAATYMTGNELTFLDDSICTGTSSGNQVNLTIQGLRAMDTGLYICKVELMYPPPYYLGIGNGTQIYVIDPEPCPDSDQPKSSDKTHTSPPSSAPELLGGSSVFLFPPKPKDTLMISRTPEVTCVVVDVSHEDPEVKFNWYVDGVEVHNAKTKPREEQYNSTYRVVSVLTVLHQDWLNGKEYKCKVSNKALPAPIEKTISKAKGQPREPQVYTLPPSRDELTKNQVSLTCLVKGFYPSDIAVEWESNGQPENNYKTTPPVLDSDGSFFLYSKLTVDKSRWQQGNVFSCSVMHEALHNHYTQKSLSLSPGK

SEQ ID NO: 333 - DNA, 465 bp, Artificial sequence
  Description of Artificial Sequence: Synthetic nucleotide sequence
gttgttaagcttgccgccatggattcacaggcccaggttcttatgttactgctgctatgggtatctggtacctgtggggacattgtgatgtcacagtctccatcctccctagctgtgtcagttggagagaaggtttctatgagctgcaagtccagtcagagccttttatataatcacaatcaaaagaactacttggcctggtaccagcagataccagggcagtctcctaaactgctgatttactgggcatccactagggaatctggggtccctgatcgcttcacaggcagtggatctgggacagatttcactctcaccatcagcagagtgaaggctgaagacctggcagtttattactgtcagcaatattatacctatcctcccacgttcggaggtggcaccaagctggaaataaaaggtggcggtggctcgggcggtggtgggtcgggtggcggcgggagctcg

SEQ ID NO: 334 - protein, 149 aa, Artificial sequence
  Description of Artificial Sequence: Synthetic amino acid sequence
MDSQAQVLMLLLLWVSGTCGDIVMSQSPSSLAVSVGEKVSMSCKSSQSLLYNHNQKNYLAWYQQIPGQSPKLLIYWASTRESGVPDRFTGSGSGTDFTLTISRVKAEDLAVYYCQQYYTYPPTFGGGTKLEIKGGGGSGGGGSGGGGSS

SEQ ID NO: 335 - DNA, 372 bp, Artificial sequence
  Description of Artificial Sequence: Synthetic nucleotide sequence
gggagctcgcaggtgcagttgaaggagtcaggacctggcctggtggcgccctcacagagcctgtccatcacatgcaccgtctcagggttctcattaaccgtctatggtgttaactgggttcgccagcctccaggaaagggtctggactggctgggaatgatatggggtgatggaagcacagactataattcagctctcaaatccagactgagcatcagtaaggacaactccaagagccaagttttcttaaaaatggacagtctacaaactgatgacacagccaggtactactgtgccagagatcactatggtacccactatgctatggactactggggtcaaggaacctcagtcaccgtctcctctgatcag

SEQ ID NO: 336 - protein, 124 aa, Artificial sequence
  Description of Artificial Sequence: Synthetic amino acid sequence
GSSQVQLKESGPGLVAPSQSLSITCTVSGFSLTVYGVNWVRQPPGKGLDWLGMIWGDGSTDYNSALKSRLSISKDNSKSQVFLKMDSLQTDDTARYYCARDHYGTHYAMDYWGQGTSVTVSSDQ

SEQ ID NO: 337 - DNA, 828 bp, Artificial sequence
  Description of Artificial Sequence: Synthetic nucleotide sequence
gttgttaagcttgccgccatggattcacaggcccaggttcttatgttactgctgctatgggtatctggtacctgtggggacattgtgatgtcacagtctccatcctccctagctgtgtcagttggagagaaggtttctatgagctgcaagtccagtcagagccttttatataatcacaatcaaaagaactacttggcctggtaccagcagataccagggcagtctcctaaactgctgatttactgggcatccactagggaatctggggtccctgatcgcttcacaggcagtggatctgggacagatttcactctcaccatcagcagagtgaaggctgaagacctggcagtttattactgtcagcaatattatacctatcctcccacgttcggaggtggcaccaagctggaaataaaaggtggcggtggctcgggcggtggtgggtcgggtggcggcgggagctctcaggtgcagttgaaggagtcaggacctggcctggtggcgccctcacagagcctgtccatcacatgcaccgtctcagggttctcattaaccgtctatggtgttaactgggttcgccagcctccaggaaagggtctggactggctgggaatgatatggggtgatggaagcacagactataattcagctctcaaatccagactgagcatcagtaaggacaactccaagagccaagttttcttaaaaatggacagtctacaaactgatgacacagccaggtactactgtgccagagatcactatggtacccactatgctatggactactggggtcaaggaacctcagtcaccgtctcctctgatcag

SEQ ID NO: 338 - protein, 270 aa, Artificial sequence
  Description of Artificial Sequence: Synthetic amino acid sequence
MDSQAQVLMLLLLWVSGTCGDIVMSQSPSSLAVSVGEKVSMSCKSSQSLLYNHNQKNYLAWYQQIPGQSPKLLIYWASTRESGVPDRFTGSGSGTDFTLTISRVKAEDLAVYYCQQYYTYPPTFGGGTKLEIKGGGGSGGGGSGGGGSSQVQLKESGPGLVAPSQSLSITCTVSGFSLTVYGVNWVRQPPGKGLDWLGMIWGDGSTDYNSALKSRLSISKDNSKSQVFLKMDSLQTDDTARYYCARDHYGTHYAMDYWGQGTSVTVSSDQ

SEQ ID NO: 339 - DNA, 372 bp, Artificial sequence
  Description of Artificial Sequence: Synthetic nucleotide sequence
gggagctctcaggtgcagttgaaggagtcaggacctggctcggtggcgccctcacagagcctgtccatcacatgcaccgtctcagggttctcattaaccgtctatggtgttaactgggttcgccagcctccaggaaagggtctggactggctgggaatgatatggggtgatggaagcacagactataattcagctctcaaatccagactgagcatcagtaaggacaactccaagagccaagttttcttaaaaatggacagtctacaaactgatgacacagccaggtactactgtgccagagatcactatggtacccactatgctatggactactggggtcaaggaacctcagtcaccgtctcctctgatcag

SEQ ID NO: 340 - protein, 124 aa, Artificial sequence
  Description of Artificial Sequence: Synthetic amino acid sequence
GSSQVQLKESGPGSVAPSQSLSITCTVSGFSLTVYGVNWVRQPPGKGLDWLGMIWGDGSTDYNSALKSRLSISKDNSKSQVFLKMDSLQTDDTARYYCARDHYGTHYAMDYWGQGTSVTVSSDQ

SEQ ID NO: 341 - DNA, 828 bp, Artificial sequence
  Description of Artificial Sequence: Synthetic nucleotide sequence
gttgttaagcttgccgccatggattcacaggcccaggttcttatgttactgctgctatgggtatctggtacctgtggggacattgtgatgtcacagtctccatcctccctagctgtgtcagttggagagaaggtttctatgagctgcaagtccagtcagagccttttatataatcacaatcaaaagaactacttggcctggtaccagcagataccagggcagtctcctaaactgctgatttactgggcatccactagggaatctggggtccctgatcgcttcacaggcagtggatctgggacagatttcactctcaccatcagcagagtgaaggctgaagacctggcagtttattactgtcagcaatattatacctatcctcccacgttcggaggtggcaccaagctggaaataaaaggtggcggtggctcgggcggtggtgggtcgggtggcggcgggagctctcaggtgcagttgaaggagtcaggacctggctcggtggcgccctcacagagcctgtccatcacatgcaccgtctcagggttctcattaaccgtctatggtgttaactgggttcgccagcctccaggaaagggtctggactggctgggaatgatatggggtgatggaagcacagactataattcagctctcaaatccagactgagcatcagtaaggacaactccaagagccaagttttcttaaaaatggacagtctacaaactgatgacacagccaggtactactgtgccagagatcactatggtacccactatgctatggactactggggtcaaggaacctcagtcaccgtctcctctgatcag

SEQ ID NO: 342 - protein, 270 aa, Artificial sequence
  Description of Artificial Sequence: Synthetic amino acid sequence
MDSQAQVLMLLLLWVSGTCGDIVMSQSPSSLAVSVGEKVSMSCKSSQSLLYNHNQKNYLAWYQQIPGQSPKLLIYWASTRESGVPDRFTGSGSGTDFTLTISRVKAEDLAVYYCQQYYTYPPTFGGGTKLEIKGGGGSGGGGSGGGGSSQVQLKESGPGSVAPSQSLSITCTVSGFSLTVYGVNWVRQPPGKGLDWLGMIWGDGSTDYNSALKSRLSISKDNSKSQVFLKMDSLQTDDTARYYCARDHYGTHYAMDYWGQGTSVTVSSDQ

SEQ ID NO: 343 - DNA, 1533 bp, Artificial sequence
  Description of Artificial Sequence: Synthetic nucleotide sequence
gttgttaagcttgccgccatggattcacaggcccaggttcttatgttactgctgctatgggtatctggtacctgtggggacattgtgatgtcacagtctccatcctccctagctgtgtcagttggagagaaggtttctatgagctgcaagtccagtcagagccttttatataatcacaatcaaaagaactacttggcctggtaccagcagataccagggcagtctcctaaactgctgatttactgggcatccactagggaatctggggtccctgatcgcttcacaggcagtggatctgggacagatttcactctcaccatcagcagagtgaaggctgaagacctggcagtttattactgtcagcaatattatacctatcctcccacgttcggaggtggcaccaagctggaaataaaaggtggcggtggctcgggcggtggtgggtcgggtggcggcgggagctctcaggtgcagttgaaggagtcaggacctggcctggtggcgccctcacagagcctgtccatcacatgcaccgtctcagggttctcattaaccgtctatggtgttaactgggttcgccagcctccaggaaagggtctggactggctgggaatgatatggggtgatggaagcacagactataattcagctctcaaatccagactgagcatcagtaaggacaactccaagagccaagttttcttaaaaatggacagtctacaaactgatgacacagccaggtactactgtgccagagatcactatggtacccactatgctatggactactggggtcaaggaacctcagtcaccgtctcctctgatcaggagcccaaatcttctgacaaaactcacacatccccaccgtcctcagcacctgaactcctgggtggaccgtcagtcttcctcttccccccaaaacccaaggacaccctcatgatctcccggacccctgaggtcacatgcgtggtggtggacgtgagccacgaagaccctgaggtcaagttcaactggtacgtggacggcgtggaggtgcataatgccaagacaaagccgcgggaggagcagtacaacagcacgtaccgtgtggtcagcgtcctcaccgtcctgcaccaggactggctgaatggcaaggagtacaagtgcaaggtctccaacaaagccctcccagcccccatcgagaaaaccatctccaaagccaaagggcagccccgagaaccacaggtgtacaccctgcccccatcccgggatgagctgaccaagaaccaggtcagcctgacctgcctggtcaaaggcttctatccaagcgacatcgccgtggagtgggagagcaatgggcagccggagaacaactacaagaccacgcctcccgtgctggactccgacggctccttcttcctctacagcaagctcaccgtggacaagagcaggtggcagcaggggaacgtcttctcatgctccgtgatgcatgaggctctgcacaaccactacacgcagaagagcctctccctgtctccgggtaaatgatctaga

SEQ ID NO: 344 - protein, 502 aa, Artificial sequence
  Description of Artificial Sequence: Synthetic amino acid sequence
MDSQAQVLMLLLLWVSGTCGDIVMSQSPSSLAVSVGEKVSMSCKSSQSLLYNHNQKNYLAWYQQIPGQSPKLLIYWASTRESGVPDRFTGSGSGTDFTLTISRVKAEDLAVYYCQQYYTYPPTFGGGTKLEIKGGGGSGGGGSGGGGSSQVQLKESGPGLVAPSQSLSITCTVSGFSLTVYGVNWVRQPPGKGLDWLGMIWGDGSTDYNSALKSRLSISKDNSKSQVFLKMDSLQTDDTARYYCARDHYGTHYAMDYWGQGTSVTVSSDQEPKSSDKTHTSPPSSAPELLGGPSVFLFPPKPKDTLMISRTPEVTCVVVDVSHEDPEVKFNWYVDGVEVHNAKTKPREEQYNSTYRVVSVLTVLHQDWLNGKEYKCKVSNKALPAPIEKTISKAKGQPREPQVYTLPPSRDELTKNQVSLTCLVKGFYPSDIAVEWESNGQPENNYKTTPPVLDSDGSFFLYSKLTVDKSRWQQGNVFSCSVMHEALHNHYTQKSLSLSPGK

SEQ ID NO: 345 - DNA, 1533 bp, Artificial sequence
  Description of Artificial Sequence: Synthetic nucleotide sequence
gttgttaagcttgccgccatggattcacaggcccaggttcttatgttactgctgctatgggtatctggtacctgtggggacattgtgatgtcacagtctccatcctccctagctgtgtcagttggagagaaggtttctatgagctgcaagtccagtcagagccttttatataatcacaatcaaaagaactacttggcctggtaccagcagataccagggcagtctcctaaactgctgatttactgggcatccactagggaatctggggtccctgatcgcttcacaggcagtggatctgggacagatttcactctcaccatcagcagagtgaaggctgaagacctggcagtttattactgtcagcaatattatacctatcctcccacgttcggaggtggcaccaagctggaaataaaaggtggcggtggctcgggcggtggtgggtcgggtggcggcgggagctctcaggtgcagttgaaggagtcaggacctggctcggtggcgccctcacagagcctgtccatcacatgcaccgtctcagggttctcattaaccgtctatggtgttaactgggttcgccagcctccaggaaagggtctggactggctgggaatgatatggggtgatggaagcacagactataattcagctctcaaatccagactgagcatcagtaaggacaactccaagagccaagttttcttaaaaatggacagtctacaaactgatgacacagccaggtactactgtgccagagatcactatggtacccactatgctatggactactggggtcaaggaacctcagtcaccgtctcctctgatcaggagcccaaatcttctgacaaaactcacacatccccaccgtcctcagcacctgaactcctgggtggaccgtcagtcttcctcttccccccaaaacccaaggacaccctcatgatctcccggacccctgaggtcacatgcgtggtggtggacgtgagccacgaagaccctgaggtcaagttcaactggtacgtggacggcgtggaggtgcataatgccaagacaaagccgcgggaggagcagtacaacagcacgtaccgtgtggtcagcgtcctcaccgtcctgcaccaggactggctgaatggcaaggagtacaagtgcaaggtctccaacaaagccctcccagcccccatcgagaaaaccatctccaaagccaaagggcagccccgagaaccacaggtgtacaccctgcccccatcccgggatgagctgaccaagaaccaggtcagcctgacctgcctggtcaaaggcttctatccaagcgacatcgccgtggagtgggagagcaatgggcagccggagaacaactacaagaccacgcctcccgtgctggactccgacggctccttcttcctctacagcaagctcaccgtggacaagagcaggtggcagcaggggaacgtcttctcatgctccgtgatgcatgaggctctgcacaaccactacacgcagaagagcctctccctgtctccgggtaaatgatctaga

SEQ ID NO: 346 - protein, 502 aa, Artificial sequence
  Description of Artificial Sequence: Synthetic amino acid sequence
MDSQAQVLMLLLLWVSGTCGDIVMSQSPSSLAVSVGEKVSMSCKSSQSLLYNHNQKNYLAWYQQIPGQSPKLLIYWASTRESGVPDRFTGSGSGTDFTLTISRVKAEDLAVYYCQQYYTYPPTFGGGTKLEIKGGGGSGGGGSGGGGSSQVQLKESGPGSVAPSQSLSITCTVSGFSLTVYGVNWVRQPPGKGLDWLGMIWGDGSTDYNSALKSRLSISKDNSKSQVFLKMDSLQTDDTARYYCARDHYGTHYAMDYWGQGTSVTVSSDQEPKSSDKTHTSPPSSAPELLGGPSVFLFPPKPKDTLMISRTPEVTCVVVDVSHEDPEVKFNWYVDGVEVHNAKTKPREEQYNSTYRVVSVLTVLHQDWLNGKEYKCKVSNKALPAPIEKTISKAKGQPREPQVYTLPPSRDELTKNQVSLTCLVKGFYPSDIAVEWESNGQPENNYKTTPPVLDSDGSFFLYSKLTVDKSRWQQGNVFSCSVMHEALHNHYTQKSLSLSPGK

SEQ ID NO: 347 - DNA, 399 bp, Artificial sequence
  Description of Artificial Sequence: Synthetic nucleotide sequence
atgggcaggcttacttcttcattcctgctactgattgttcctgcatatgtcctctcccagattactctgaaagagtctggccctgggatcttgcagccctcccagaccctcagtctgacttgttctttctctgggttttcactgaccacttatggtataggagtaggttggattcgtcagcctccagggaagggtctggagtggctgacacacatttggtggaatgataataagtactataacacagccctgaggagccggctcacaatctccaaggattcctccaacaaccaagtactcctcaagatcgccaatgtggacactgcagataccgccacatactactgtctctacggctacacttactggggccaagggactctggtcactgtctctgca

SEQ ID NO: 348 - protein, 133 aa, Artificial sequence
  Description of Artificial Sequence: Synthetic amino acid sequence
MGRLTSSFLLLIVPAYVLSQITLKESGPGILQPSQTLSLTCSFSGFSLTTYGIGVGWIRQPPGKGLEWLTHIWWNDNKYYNTALRSRLTISKDSSNNQVLLKIANVDTADTATYYCLYGYTYWGQGTLVTVSA

SEQ ID NO: 349 - DNA, 393 bp, Artificial sequence
  Description of Artificial Sequence: Synthetic nucleotide sequence
atgaagttgcctgttaggctgttggtgctgatgttctggattcctgcttccatcagtgatgttgtgatgacccaaactccactctccctgcctgtcagtcttggagatcaggcctccatctcttgcagatctagtcagagccttctttacagtaatggaaacacctatttacattggtacctgcagaagccaggccagtctccaaaactcctgatctacaaactttccaaccgattttctggggtcccagacaggttcagtggcagtggatcagggacagatttcacactcaagatcagcagagtggaggctgaggatctgggagtttatttctgctctcaaagtacacatgttccgtggacgttcggtggaggcaccaagctggaaatcaaa

SEQ ID NO: 350 - protein, 131 aa, Artificial sequence
  Description of Artificial Sequence: Synthetic amino acid sequence
MKLPVRLLVLMFWIPASISDVVMTQTPLSLPVSLGDQASISCRSSQSLLYSNGNTYLHWYLQKPGQSPKLLIYKLSNRFSGVPDRFSGSGSGTDFTLKISRVEAEDLGVYFCSQSTHVPWTFGGGTKLEIK

SEQ ID NO: 351 - DNA, 806 bp, Artificial sequence
  Description of Artificial Sequence: Synthetic nucleotide sequence
gttgttaagcttgccgccatgaagttgcctgttaggctgttggtgctgatgttctggattcctgcttccatcagtgatgttgtgatgacccaaactccactctccctgcctgtcagtcttggagatcaggcctccatctcttgcagatctagtcagagccttctttacagtaatggaaacacctatttacattggtacctgcagaagccaggccagtctccaaaactcctgatctacaaactttccaaccgattttctggggtcccagacaggttcagtggcagtggatcagggacagatttcacactcaagatcagcagagtggaggctgaggatctgggagtttatttctgctctcaaagtacacatgttccgtggacgttcggtggaggcaccaagctggaaatcaaagatggcggtggctcgggcggtggtggatctggaggaggtgggagctctcagattactctgaaagagtctggccctgggatcttgcagccctcccagaccctcagtctgacttgttctttctctgggttttcactgaccacttatggtataggagtaggttggattcgtcagcctccagggaagggtctggagtggctgacacacatttggtggaatgataataagtactataacacagccctgaggagccggctcacaatctccaaggattcctccaacaaccaagtactcctcaagatcgccaatgtggacactgcagataccgccacatactactgtctctacggctacacttactggggccaagggactctggtcactgtctctgctgatca

SEQ ID NO: 352 - protein, 262 aa, Artificial sequence
  Description of Artificial Sequence: Synthetic amino acid sequence
MKLPVRLLVLMFWIPASISDVVMTQTPLSLPVSLGDQASISCRSSQSLLYSNGNTYLHWYLQKPGQSPKLLIYKLSNRFSGVPDRFSGSGSGTDFTLKISRVEAEDLGVYFCSQSTHVPWTFGGGTKLEIKDGGGSGGGGSGGGGSSQITLKESGPGILQPSQTLSLTCSFSGFSLTTYGIGVGWIRQPPGKGLEWLTHIWWNDNKYYNTALRSRLTISKDSSNNQVLLKIANVDTADTATYYCLYGYTYWGQGTLVTVSAD

SEQ ID NO: 353 - DNA, 356 bp, Artificial sequence
  Description of Artificial Sequence: Synthetic nucleotide sequence
gggagctctcagattactctgaaagagtctggccctgggatcttgcagccctcccagaccctcagtctgacttgttctttctctgggttttcactgaccacttatggtataggagtaggttggattcgtcagcctccagggaagggtctggagtggctgacacacatttggtggaatgataataagtactataacacagccctgaggagccggctcacaatctccaaggattcctccaacaaccaagtactcctcaagatcgccaatgtggacactgcagataccgccacatactactgtctctacggctacacttactggggccaagggactctggtcactgtctctgctgatca

SEQ ID NO: 354 - protein, 118 aa, Artificial sequence
  Description of Artificial Sequence: Synthetic amino acid sequence
GSSQITLKESGPGSSQPSQTLSLTCSFSGFSLTTYGIGVGWIRQPPGKGLEWLTHIWWNDNKYYNTALRSRLTISKDSSNNQVLLKIANVDTADTATYYCLYGYTYWGQGTLVTVSAD

SEQ ID NO: 355 - DNA, 806 bp, Artificial sequence
  Description of Artificial Sequence: Synthetic nucleotide sequence
gttgttaagcttgccgccatgaagttgcctgttaggctgttggtgctgatgttctggattcctgcttccatcagtgatgttgtgatgacccaaactccactctccctgcctgtcagtcttggagatcaggcctccatctcttgcagatctagtcagagccttctttacagtaatggaaacacctatttacattggtacctgcagaagccaggccagtctccaaaactcctgatctacaaactttccaaccgattttctggggtcccagacaggttcagtggcagtggatcagggacagatttcacactcaagatcagcagagtggaggctgaggatctgggagtttatttctgctctcaaagtacacatgttccgtggacgttcggtggaggcaccaagctggaaatcaaagatggcggtggctcgggcggtggtggatctggaggaggtgggagctctcagattactctgaaagagtctggccctgggagctcccagccctcccagaccctcagtctgacttgttctttctctgggttttcactgaccacttatggtataggagtaggttggattcgtcagcctccagggaagggtctggagtggctgacacacatttggtggaatgataataagtactataacacagccctgaggagccggctcacaatctccaaggattcctccaacaaccaagtactcctcaagatcgccaatgtggacactgcagataccgccacatactactgtctctacggctacacttactggggccaagggactctggtcactgtctctgctgatca

SEQ ID NO: 356 - protein, 262 aa, Artificial sequence
  Description of Artificial Sequence: Synthetic amino acid sequence
MKLPVRLLVLMFWIPASISDVVMTQTPLSLPVSLGDQASISCRSSQSLLYSNGNTYLHWYLQKPGQSPKLLIYKLSNRFSGVPDRFSGSGSGTDFTLKISRVEAEDLGVYFCSQSTHVPWTFGGGTKLEIKDGGGSGGGGSGGGGSSQITLKESGPGSSQPSQTLSLTCSFSGFSLTTYGIGVGWIRQPPGKGLEWLTHIWWNDNKYYNTALRSRLTISKDSSNNQVLLKIANVDTADTATYYCLYGYTYWGQGTLVTVSAD

SEQ ID NO: 357 - DNA, 1512 bp, Artificial sequence
  Description of Artificial Sequence: Synthetic nucleotide sequence
gttgttaagcttgccgccatgaagttgcctgttaggctgttggtgctgatgttctggattcctgcttccatcagtgatgttgtgatgacccaaactccactctccctgcctgtcagtcttggagatcaggcctccatctcttgcagatctagtcagagccttctttacagtaatggaaacacctatttacattggtacctgcagaagccaggccagtctccaaaactcctgatctacaaactttccaaccgattttctggggtcccagacaggttcagtggcagtggatcagggacagatttcacactcaagatcagcagagtggaggctgaggatctgggagtttatttctgctctcaaagtacacatgttccgtggacgttcggtggaggcaccaagctggaaatcaaagatggcggtggctcgggcggtggtggatctggaggaggtgggagctctcagattactctgaaagagtctggccctgggatcttgcagccctcccagaccctcagtctgacttgttctttctctgggttttcactgaccacttatggtataggagtaggttggattcgtcagcctccagggaagggtctggagtggctgacacacatttggtggaatgataataagtactataacacagccctgaggagccggctcacaatctccaaggattcctccaacaaccaagtactcctcaagatcgccaatgtggacactgcagataccgccacatactactgtctctacggctacacttactggggccaagggactctggtcactgtctctgctgatcaggagcccaaatcttctgacaaaactcacacatccccaccgtcctcagcacctgaactcctgggtggaccgtcagtcttcctcttccccccaaaacccaaggacaccctcatgatctcccggacccctgaggtcacatgcgtggtggtggacgtgagccacgaagaccctgaggtcaagttcaactggtacgtggacggcgtggaggtgcataatgccaagacaaagccgcgggaggagcagtacaacagcacgtaccgtgtggtcagcgtcctcaccgtcctgcaccaggactggctgaatggcaaggagtacaagtgcaaggtctccaacaaagccctcccagcccccatcgagaaaaccatctccaaagccaaagggcagccccgagaaccacaggtgtacaccctgcccccatcccgggatgagctgaccaagaaccaggtcagcctgacctgcctggtcaaaggcttctatccaagcgacatcgccgtggagtgggagagcaatgggcagccggagaacaactacaagaccacgcctcccgtgctggactccgacggctccttcttcctctacagcaagctcaccgtggacaagagcaggtggcagcaggggaacgtcttctcatgctccgtgatgcatgaggctctgcacaaccactacacgcagaagagcctctccctgtctccgggtaaatgatctaga

SEQ ID NO: 358 - protein, 495 aa, Artificial sequence
  Description of Artificial Sequence: Synthetic amino acid sequence
MKLPVRLLVLMFWIPASISDVVMTQTPLSLPVSLGDQASISCRSSQSLLYSNGNTYLHWYLQKPGQSPKLLIYKLSNRFSGVPDRFSGSGSGTDFTLKISRVEAEDLGVYFCSQSTHVPWTFGGGTKLEIKDGGGSGGGGSGGGGSSQITLKESGPGILQPSQTLSLTCSFSGFSLTTYGIGVGWIRQPPGKGLEWLTHIWWNDNKYYNTALRSRLTISKDSSNNQVLLKIANVDTADTATYYCLYGYTYWGQGTLVTVSADQEPKSSDKTHTSPPSSAPELLGGPSVFLFPPKPKDTLMISRTPEVTCVVVDVSHEDPEVKFNWYVDGVEVHNAKTKPREEQYNSTYRVVSVLTVLHQDWLNGKEYKCKVSNKALPAPIEKTISKAKGQPREPQVYTLPPSRDELTKNQVSLTCLVKGFYPSDIAVEWESNGQPENNYKTTPPVLDSDGSFFLYSKLTVDKSRWQQGNVFSCSVMHEALHNHYTQKSLSLSPGK

SEQ ID NO: 359 - DNA, 1513 bp, Artificial sequence
  Description of Artificial Sequence: Synthetic nucleotide sequence
gttgttaagcttgccgccatgaagttgcctgttaggctgttggtgctgatgttctggattcctgcttccatcagtgatgttgtgatgacccaaactccactctccctgcctgtcagtcttggagatcaggcctccatctcttgcagatctagtcagagccttctttacagtaatggaaacacctatttacattggtacctgcagaagccaggccagtctccaaaactcctgatctacaaactttccaaccgattttctggggtcccagacaggttcagtggcagtggatcagggacagatttcacactcaagatcagcagagtggaggctgaggatctgggagtttatttctgctctcaaagtacacatgttccgtggacgttcggtggaggcaccaagctggaaatcaaagatggcggtggctcgggcggtggtggatctggaggaggtgggagctctcagattactctgaaagagtctggccctgggagctcccagccctcccagaccctcagtctgacttgttctttctctgggttttcactgaccacttatggtataggagtaggttggattcgtcagcctccagggaagggtctggagtggctgacacacatttggtggaatgataataagtactataacacagccctgaggagccggctcacaatctccaaggattcctccaacaaccaagtactcctcaagatcgccaatgtggacactgcagataccgccacatactactgtctctacggctacacttactggggccaagggactctggtcactgtctctgctgatcaggagcccaaatcttctgacaaaactcacacatccccaccgtcctcagcacctgaactcctgggtggaccgtcagtcttcctcttccccccaaaacccaaggacaccctcatgatctcccggacccctgaggtcacatgcgtggtggtggacgtgagccacgaagaccctgaggtcaagttcaactggtacgtggacggcgtggaggtgcataatgccaagacaaagccgcgggaggagcagtacaacagcacgtaccgtgtggtcagcgtcctcaccgtcctgcaccaggactggctgaatggcaaggagtacaagtgcaaggtctccaacaaagccctcccagcccccatcgagaaaaccatctccaaagccaaagggcagccccgagaaccacaggtgtacaccctgcccccatcccgggatgagctgaccaagaaccaggtcagcctgacctgcctggtcaaaggcttctatccaagcgacatcgccgtggagtgggagagcaatgggcagccggagaacaactacaagaccacgcctcccgtgctggactccgacggctccttcttcctctacagcaagctcaccgtggacaagagcaggtggcagcaggggaacgtcttctcatgctccgtgatgcatgaggctctgcacaaccactacacgcagaagagcctctccctgtctccgggtaaatgatctagaa

SEQ ID NO: 360 - protein, 495 aa, Artificial sequence
  Description of Artificial Sequence: Synthetic amino acid sequence
MKLPVRLLVLMFWIPASISDVVMTQTPLSLPVSLGDQASISCRSSQSLLYSNGNTYLHWYLQKPGQSPKLLIYKLSNRFSGVPDRFSGSGSGTDFTLKISRVEAEDLGVYFCSQSTHVPWTFGGGTKLEIKDGGGSGGGGSGGGGSSQITLKESGPGSSQPSQTLSLTCSFSGFSLTTYGIGVGWIRQPPGKGLEWLTHIWWNDNKYYNTALRSRLTISKDSSNNQVLLKIANVDTADTATYYCLYGYTYWGQGTLVTVSADQEPKSSDKTHTSPPSSAPELLGGPSVFLFPPKPKDTLMISRTPEVTCVVVDVSHEDPEVKFNWYVDGVEVHNAKTKPREEQYNSTYRVVSVLTVLHQDWLNGKEYKCKVSNKALPAPIEKTISKAKGQPREPQVYTLPPSRDELTKNQVSLTCLVKGFYPSDIAVEWESNGQPENNYKTTPPVLDSDGSFFLYSKLTVDKSRWQQGNVFSCSVMHEALHNHYTQKSLSLSPGK

SEQ ID NO: 361 - DNA, 376 bp, Artificial sequence
  Description of Artificial Sequence: Synthetic nucleotide sequence
gggagctctcaggtgcagctgaagcagtcaggacctggctcagtgcagtcctcacagagcctgtccatcacctgcacagtctctggtttctcattaactacctatgctgtacactgggttcgccagtctccaggaaagggtctggagtggctgggagtgatatggagtggtggaatcacagactataatgcagctttcatatccagactgagcatcaccaaggacgattccaagagccaagttttctttaaaatgaacagtctgcaacctaatgacacagccatttattactgtgccagaaatgggggtgataactacccttattactatgctatggactactggggtcaaggaacctcagtcaccgtctcctcag

SEQ ID NO: 362 - protein, 125 aa, Artificial sequence
  Description of Artificial Sequence: Synthetic amino acid sequence
GSSQVQLKQSGPGSVQSSQSLSITCTVSGFSLTTYAVHWVRQSPGKGLEWLGVIWSGGITDYNAAFISRLSITKDDSKSQVFFKMNSLQPNDTAIYYCARNGGDNYPYYYAMDYWGQGTSVTVSS

SEQ ID NO: 363 - DNA, 826 bp, Artificial sequence
  Description of Artificial Sequence: Synthetic nucleotide sequence
aagcttgccgccatgaggttctctgctcagcttctggggctgcttgtgctctggatccctggatccactgcagatattgtgatgacgcaggctgcattctccaatccagtcactcttggaacatcagcttccatctcctgcaggtctagtaagagtctcctacatagtaatggcatcacttatttgtattggtatctgcagaagccaggccagtctcctcagctcctgatttatcagatgtccaaccttgcctcaggagtcccagacaggttcagtagcagtgggtcaggaactgatttcacactgagaatcagcagagtggaggctgaggatgtgggtgtttattactgtgctcaaaatctagaacttccgctcacgttcggtgctgggaccaagctggagctgaaacggggtggcggtggctcgggcggtggtgggtcgggtggcggcgggagctctcaggtgcagctgaagcagtcaggacctggctcagtgcagtcctcacagagcctgtccatcacctgcacagtctctggtttctcattaactacctatgctgtacactgggttcgccagtctccaggaaagggtctggagtggctgggagtgatatggagtggtggaatcacagactataatgcagctttcatatccagactgagcatcaccaaggacgattccaagagccaagttttctttaaaatgaacagtctgcaacctaatgacacagccatttattactgtgccagaaatgggggtgataactacccttattactatgctatggactactggggtcaaggaacctcagtcaccgtctcctcag

SEQ ID NO: 364 - protein, 271 aa, Artificial sequence
  Description of Artificial Sequence: Synthetic amino acid sequence
MRFSAQLLGLLVLWIPGSTADIVMTQAAFSNPVTLGTSASISCRSSKSLLHSNGITYLYWYLQKPGQSPQLLIYQMSNLASGVPDRFSSSGSGTDFTLRISRVEAEDVGVYYCAQNLELPLTFGAGTKLELKRGGGGSGGGGSGGGGSSQVQLKQSGPGSVQSSQSLSITCTVSGFSLTTYAVHWVRQSPGKGLEWLGVIWSGGITDYNAAFISRLSITKDDSKSQVFFKMNSLQPNDTAIYYCARNGGDNYPYYYAMDYWGQGTSVTVSS

SEQ ID NO: 365 - DNA, 1537 bp, Artificial sequence
  Description of Artificial Sequence: Synthetic nucleotide sequence
aagcttgccgccatgaggttctctgctcagcttctggggctgcttgtgctctggatccctggatccactgcagatattgtgatgacgcaggctgcattctccaatccagtcactcttggaacatcagcttccatctcctgcaggtctagtaagagtctcctacatagtaatggcatcacttatttgtattggtatctgcagaagccaggccagtctcctcagctcctgatttatcagatgtccaaccttgcctcaggagtcccagacaggttcagtagcagtgggtcaggaactgatttcacactgagaatcagcagagtggaggctgaggatgtgggtgtttattactgtgctcaaaatctagaacttccgctcacgttcggtgctgggaccaagctggagctgaaacggggtggcggtggctcgggcggtggtgggtcgggtggcggcgggagctctcaggtgcagctgaagcagtcaggacctggctcagtgcagtcctcacagagcctgtccatcacctgcacagtctctggtttctcattaactacctatgctgtacactgggttcgccagtctccaggaaagggtctggagtggctgggagtgatatggagtggtggaatcacagactataatgcagctttcatatccagactgagcatcaccaaggacgattccaagagccaagttttctttaaaatgaacagtctgcaacctaatgacacagccatttattactgtgccagaaatgggggtgataactacccttattactatgctatggactactggggtcaaggaacctcagtcaccgtctcctctgatcaggagcccaaatcttctgacaaaactcacacatccccaccgtcctcagcacctgaactcctgggtggaccgtcagtcttcctcttccccccaaaacccaaggacaccctcatgatctcccggacccctgaggtcacatgcgtggtggtggacgtgagccacgaagaccctgaggtcaagttcaactggtacgtggacggcgtggaggtgcataatgccaagacaaagccgcgggaggagcagtacaacagcacgtaccgtgtggtcagcgtcctcaccgtcctgcaccaggactggctgaatggcaaggagtacaagtgcaaggtctccaacaaagccctcccagcccccatcgagaaaaccatctccaaagccaaagggcagccccgagaaccacaggtgtacaccctgcccccatcccgggatgagctgaccaagaaccaggtcagcctgacctgcctggtcaaaggcttctatccaagcgacatcgccgtggagtgggagagcaatgggcagccggagaacaactacaagaccacgcctcccgtgctggactccgacggctccttcttcctctacagcaagctcaccgtggacaagagcaggtggcagcaggggaacgtcttctcatgctccgtgatgcatgaggctctgcacaaccactacacgcagaagagcctctccctgtctccgggtaaatgatctagag

SEQ ID NO: 366 - protein, 505 aa, Artificial sequence
  Description of Artificial Sequence: Synthetic amino acid sequence
MRFSAQLLGLLVLWIPGSTADIVMTQAAFSNPVTLGTSASISCRSSKSLLHSNGITYLYWYLQKPGQSPQLLIYQMSNLASGVPDRFSSSGSGTDFTLRISRVEAEDVGVYYCAQNLELPLTFGAGTKLELKRGGGGSGGGGSGGGGSSQVQLKQSGPGSVQSSQSLSITCTVSGFSLTTYAVHWVRQSPGKGLEWLGVIWSGGITDYNAAFISRLSITKDDSKSQVFFKMNSLQPNDTAIYYCARNGGDNYPYYYAMDYWGQGTSVTVSSDQEPKSSDKTHTSPPSSAPELLGGPSVFLFPPKPKDTLMISRTPEVTCVVVDVSHEDPEVKFNWYVDGVEVHNAKTKPREEQYNSTYRVVSVLTVLHQDWLNGKEYKCKVSNKALPAPIEKTISKAKGQPREPQVYTLPPSRDELTKNQVSLTCLVKGFYPSDIAVEWESNGQPENNYKTTPPVLDSDGSFFLYSKLTVDKSRWQQGNVFSCSVMHEALHNHYTQKSLSLSPGK

SEQ ID NO: 367 - DNA, 1521 bp, Artificial sequence
  Description of Artificial Sequence: Synthetic nucleotide sequence
aagcttgccgccatggattttcaagtgcagattttcagcttcctgctaatcagtgcttcagtcataattgccagaggacaaattgttctctcccagtctccagcaatcctgtctgcatctccaggggagaaggtcacaatgacttgcagggccagctcaagtgtaagttacatgcactggtaccagcagaagccaggatcctcccccaaaccctggatttatgccccatccaacctggcttctggagtccctgctcgcttcagtggcagtgggtctgggacctcttactctctcacaatcagcagagtggaggctgaagatgctgccacttattactgccagcagtggagttttaacccacccacgttcggtgctgggaccaagctggagctgaaagatggcggtggctcgggcggtggtggatctggaggaggtgggagctctcaggcttatctacagcagtctggggctgagtcggtgaggcctggggcctcagtgaagatgtcctgcaaggcttctggctacacatttaccagttacaatatgcactgggtaaagcagacacctagacagggcctggaatggattggagctatttatccaggaaatggtgatacttcctacaatcagaagttcaagggcaaggccacactgactgtagacaaatcctccagcacagcctacatgcagctcagcagcctgacatctgaagactctgcggtctatttctgtgcaagagtggtgtactatagtaactcttactggtacttcgatgtctggggcacagggaccacggtcaccgtctcttctgatcaggagcccaaatcttctgacaaaactcacacatccccaccgtcctcagcacctgaactcctggggggatcgtcagtcttcctcttccccccaaaacccaaggacaccctcatgatctcccggacccctgaggtcacatgcgtggtggtggacgtgagccacgaagaccctgaggtcaagttcaactggtacgtggacggcgtggaggtgcataatgccaagacaaagccgcgggaggagcagtacaacagcacgtaccgtgtggtcagcgtcctcaccgtcctgcaccaggactggctgaatggcaaggagtacaagtgcaaggtctccaacaaagccctcccagcccccatcgagaaaacaatctccaaagccaaagggcagccccgagaaccacaggtgtacaccctgcccccatcccgggatgagctgaccaagaaccaggtcagcctgacctgcctggtcaaaggcttctatcccagcgacatcgccgtggagtgggagagcaatgggcagccggagaacaactacaagaccacgcctcccgtgctggactccgacggctccttcttcctctacagcaagctcaccgtggacaagagcaggtggcagcaggggaacgtcttctcatgctccgtgatgcatgaggctctgcacaaccactacacgcagaagagcctctccctgtctccgggtaaatgatctaga

SEQ ID NO: 368 - protein, 500 aa, Artificial sequence
  Description of Artificial Sequence: Synthetic amino acid sequence
MDFQVQIFSFLLISASVIIARGQIVLSQSPAILSASPGEKVTMTCRASSSVSYMHWYQQKPGSSPKPWIYAPSNLASGVPARFSGSGSGTSYSLTISRVEAEDAATYYCQQWSFNPPTFGAGTKLELKDGGGSGGGGSGGGGSSQAYLQQSGAESVRPGASVKMSCKASGYTFTSYNMHWVKQTPRQGLEWIGAIYPGNGDTSYNQKFKGKATLTVDKSSSTAYMQLSSLTSEDSAVYFCARVVYYSNSYWYFDVWGTGTTVTVSSDQEPKSSDKTHTSPPSSAPELLGGSSVFLFPPKPKDTLMISRTPEVTCVVVDVSHEDPEVKFNWYVDGVEVHNAKTKPREEQYNSTYRVVSVLTVLHQDWLNGKEYKCKVSNKALPAPIEKTISKAKGQPREPQVYTLPPSRDELTKNQVSLTCLVKGFYPSDIAVEWESNGQPENNYKTTPPVLDSDGSFFLYSKLTVDKSRWQQGNVFSCSVMHEALHNHYTQKSLSLSPGK

SEQ ID NO: 369 - DNA, 1521 bp, Artificial sequence
  Description of Artificial Sequence: Synthetic nucleotide sequence
aagcttgccgccatggattttcaagtgcagattttcagcttcctgctaatcagtgcttcagtcataattgccagaggacaaattgttctctcccagtctccagcaatcctgtctgcatctccaggggagaaggtcacaatgacttgcagggccagctcaagtgtaagttacatgcactggtaccagcagaagccaggatcctcccccaaaccctggatttatgccccatccaacctggcttctggagtccctgctcgcttcagtggcagtgggtctgggacctcttactctctcacaatcagcagagtggaggctgaagatgctgccacttattactgccagcagtggagttttaacccacccacgttcggtgctgggaccaagctggagctgaaagatggcggtggctcgggcggtggtggatctggaggaggtgggagctctcaggcttatctacagcagtctggggctgagtcggtgaggcctggggcctcagtgaagatgtcctgcaaggcttctggctacacatttaccagttacaatatgcactgggtaaagcagacacctagacagggcctggaatggattggagctatttatccaggaaatggtgatacttcctacaatcagaagttcaagggcaaggccacactgactgtagacaaatcctccagcacagcctacatgcagctcagcagcctgacatctgaagactctgcggtctatttctgtgcaagagtggtgtactatagtaactcttactggtacttcgatgtctggggcacagggaccacggtcaccgtctcttctgatcaggagcccaaatcttctgacaaaactcacacatccccaccgtcctcagcacctgaactcctggggggaccgtcagtcttcctcttccccccaaaacccaaggacaccctcatgatctcccggacccctgaggtcacatgcgtggtggtggacgtgagccacgaagaccctgaggtcaagttcaactggtacgtggacggcgtggaggtgcataatgccaagacaaagccgcgggaggagcagtacaacagcacgtaccgtgtggtcagcgtcctcaccgtcctgcaccaggactggctgaatggcaaggagtacaagtgcaaggtctccaacaaagccctcccagcccccatcgagaaaacaatctccaaagccaaagggcagccccgagaaccacaggtgtacaccctgcccccatcccgggatgagctgaccaagaaccaggtcagcctgacctgcctggtcaaaggcttctatcccagcgacatcgccgtggagtgggagagcaatgggcagccggagaacaactacaagaccacgcctcccgtgctggactccgacggctccttcttcctctacagcaagctcaccgtggacaagagcaggtggcagcaggggaacgtcttctcatgctccgtgatgcatgaggctctgcacaaccactacacgcagaagagcctctccctgtctccgggtaaatgatctaga

SEQ ID NO: 370 - protein, 500 aa, Artificial sequence
  Description of Artificial Sequence: Synthetic amino acid sequence
MDFQVQIFSFLLISASVIIARGQIVLSQSPAILSASPGEKVTMTCRASSSVSYMHWYQQKPGSSPKPWIYAPSNLASGVPARFSGSGSGTSYSLTISRVEAEDAATYYCQQWSFNPPTFGAGTKLELKDGGGSGGGGSGGGGSSQAYLQQSGAESVRPGASVKMSCKASGYTFTSYNMHWVKQTPRQGLEWIGAIYPGNGDTSYNQKFKGKATLTVDKSSSTAYMQLSSLTSEDSAVYFCARVVYYSNSYWYFDVWGTGTTVTVSSDQEPKSSDKTHTSPPSSAPELLGGPSVFLFPPKPKDTLMISRTPEVTCVVVDVSHEDPEVKFNWYVDGVEVHNAKTKPREEQYNSTYRVVSVLTVLHQDWLNGKEYKCKVSNKALPAPIEKTISKAKGQPREPQVYTLPPSRDELTKNQVSLTCLVKGFYPSDIAVEWESNGQPENNYKTTPPVLDSDGSFFLYSKLTVDKSRWQQGNVFSCSVMHEALHNHYTQKSLSLSPGK

SEQ ID NO: 371 - DNA, 1521 bp, Artificial sequence
  Description of Artificial Sequence: Synthetic nucleotide sequence
aagcttgccgccatggattttcaagtgcagattttcagcttcctgctaatcagtgcttcagtcataattgccagaggacaaattgttctctcccagtctccagcaatcctgtctgcatctccaggggagaaggtcacaatgacttgcagggccagctcaagtgtaagttacatgcactggtaccagcagaagccaggatcctcccccaaaccctggatttatgccccatccaacctggcttctggagtccctgctcgcttcagtggcagtgggtctgggacctcttactctctcacaatcagcagagtggaggctgaagatgctgccacttattactgccagcagtggagttttaacccacccacgttcggtgctgggaccaagctggagctgaaagatggcggtggctcgggcggtggtggatctggaggaggtgggagctctcaggcttatctacagcagtctggggctgagtcggtgaggcctggggcctcagtgaagatgtcctgcaaggcttctggctacacatttaccagttacaatatgcactgggtaaagcagacacctagacagggcctggaatggattggagctatttatccaggaaatggtgatacttcctacaatcagaagttcaagggcaaggccacactgactgtagacaaatcctccagcacagcctacatgcagctcagcagcctgacatctgaagactctgcggtctatttctgtgcaagagtggtgtactatagtaactcttactggtacttcgatgtctggggcacagggaccacggtcaccgtctcttctgatcaggagcccaaatcttgtgacaaaactcacacatccccaccgtcctcagcacctgaactcctggggggaccgtcagtcttcctcttccccccaaaacccaaggacaccctcatgatctcccggacccctgaggtcacatgcgtggtggtggacgtgagccacgaagaccctgaggtcaagttcaactggtacgtggacggcgtggaggtgcataatgccaagacaaagccgcgggaggagcagtacaacagcacgtaccgtgtggtcagcgtcctcaccgtcctgcaccaggactggctgaatggcaaggagtacaagtgcaaggtctccaacaaagccctcccagcccccatcgagaaaacaatctccaaagccaaagggcagccccgagaaccacaggtgtacaccctgcccccatcccgggatgagctgaccaagaaccaggtcagcctgacctgcctggtcaaaggcttctatcccagcgacatcgccgtggagtgggagagcaatgggcagccggagaacaactacaagaccacgcctcccgtgctggactccgacggctccttcttcctctacagcaagctcaccgtggacaagagcaggtggcagcaggggaacgtcttctcatgctccgtgatgcatgaggctctgcacaaccactacacgcagaagagcctctccctgtctccgggtaaatgatctaga

SEQ ID NO: 372 - protein, 500 aa, Artificial sequence
  Description of Artificial Sequence: Synthetic amino acid sequence
MDFQVQIFSFLLISASVIIARGQIVLSQSPAILSASPGEKVTMTCRASSSVSYMHWYQQKPGSSPKPWIYAPSNLASGVPARFSGSGSGTSYSLTISRVEAEDAATYYCQQWSFNPPTFGAGTKLELKDGGGSGGGGSGGGGSSQAYLQQSGAESVRPGASVKMSCKASGYTFTSYNMHWVKQTPRQGLEWIGAIYPGNGDTSYNQKFKGKATLTVDKSSSTAYMQLSSLTSEDSAVYFCARVVYYSNSYWYFDVWGTGTTVTVSSDQEPKSCDKTHTSPPSSAPELLGGPSVFLFPPKPKDTLMISRTPEVTCVVVDVSHEDPEVKFNWYVDGVEVHNAKTKPREEQYNSTYRVVSVLTVLHQDWLNGKEYKCKVSNKALPAPIEKTISKAKGQPREPQVYTLPPSRDELTKNQVSLTCLVKGFYPSDIAVEWESNGQPENNYKTTPPVLDSDGSFFLYSKLTVDKSRWQQGNVFSCSVMHEALHNHYTQKSLSLSPGK

SEQ ID NO: 373 - DNA, 1507 bp, Artificial sequence
  Description of Artificial Sequence: Synthetic nucleotide sequence
gttgttaagcttgccgccatggtatccacagctcagttccttgggttgctgctgctgtggcttacaggtggcagatgtgacatccagatgactcagtctccagcctccctatctgcatctgtgggagagactgtcaccatcacatgtcgaacaagtgaaaatgtttacagttatttggcttggtatcagcagaaacagggaaaatctcctcagctcctggtctcttttgcaaaaaccttagcagaaggtgtgccatcaaggttcagtggcagtggatcaggcacacagttttctctgaagatcagcagcctgcagcctgaagattctggaagttatttctgtcaacatcattccgataatccgtggacgttcggtggaggcaccgaactggagatcaaaggtggcggtggctcgggcggtggtgggtcgggtggcggcggatcgtcagcggtccagctgcagcagtctggacctgagtcggaaaagcctggcgcttcagtgaagatttcctgcaaggcttctggttactcattcactggctacaatatgaactgggtgaagcagaataatggaaagagccttgagtggattggaaatattgatccttattatggtggtactacctacaaccggaagttcaagggcaaggccacattgactgtagacaaatcctccagcacagcctacatgcagctcaagagtctgacatctgaggactctgcagtctattactgtgcaagatcggtcggccctatggactactggggtcaaggaacctcagtcaccgtctcttctgatcaggagcccaaatcttctgacaaaactcacacatgcccaccgtcctcagcacctgaactcctgggtggaccgtcagtcttcctcttccccccaaaacccaaggacaccctcatgatctcccggacccctgaggtcacatgcgtggtggtggacgtgagccacgaagaccctgaggtcaagttcaactggtacgtggacggcgtggaggtgcataatgccaagacaaagccgcgggaggagcagtacaacagcacgtaccgtgtggtcagcgtcctcaccgtcctgcaccaggactggctgaatggcaaggagtacaagtgcaaggtctccaacaaagccctcccagcccccatcgagaaaacaatctccaaagccaaagggcagccccgagaaccacaggtgtacaccctgcccccatcccgggatgagctgaccaagaaccaggtcagcctgacctgcctggtcaaaggcttctatccaagcgacatcgccgtggagtgggagagcaatgggcagccggagaacaactacaagaccacgcctcccgtgctggactccgacggctccttcttcctctacagcaagctcaccgtggacaagagcaggtggcagcaggggaacgtcttctcatgctccgtgatgcatgaggctctgcacaaccactacacgcagaagagcctctccctgtctccgggtaaatgatctagag

SEQ ID NO: 374 - protein, 493 aa, Artificial sequence
  Description of Artificial Sequence: Synthetic amino acid sequence
MVSTAQFLGLLLLWLTGGRCDIQMTQSPASLSASVGETVTITCRTSENVYSYLAWYQQKQGKSPQLLVSFAKTLAEGVPSRFSGSGSGTQFSLKISSLQPEDSGSYFCQHHSDNPWTFGGGTELEIKGGGGSGGGGSGGGGSSAVQLQQSGPESEKPGASVKISCKASGYSFTGYNMNWVKQNNGKSLEWIGNIDPYYGGTTYNRKFKGKATLTVDKSSSTAYMQLKSLTSEDSAVYYCARSVGPMDYWGQGTSVTVSSDQEPKSSDKTHTCPPSSAPELLGGPSVFLFPPKPKDTLMISRTPEVTCVVVDVSHEDPEVKFNWYVDGVEVHNAKTKPREEQYNSTYRVVSVLTVLHQDWLNGKEYKCKVSNKALPAPIEKTISKAKGQPREPQVYTLPPSRDELTKNQVSLTCLVKGFYPSDIAVEWESNGQPENNYKTTPPVLDSDGSFFLYSKLTVDKSRWQQGNVFSCSVMHEALHNHYTQKSLSLSPGK

SEQ ID NO: 375 - DNA, 1506 bp, Artificial sequence
  Description of Artificial Sequence: Synthetic nucleotide sequence
gttgttaagcttgccgccatggtatccacagctcagttccttgggttgctgctgctgtggcttacaggtggcagatgtgacatccagatgactcagtctccagcctccctatctgcatctgtgggagagactgtcaccatcacatgtcgaacaagtgaaaatgtttacagttatttggcttggtatcagcagaaacagggaaaatctcctcagctcctggtctcttttgcaaaaaccttagcagaaggtgtgccatcaaggttcagtggcagtggatcaggcacacagttttctctgaagatcagcagcctgcagcctgaagattctggaagttatttctgtcaacatcattccgataatccgtggacgttcggtggaggcaccgaactggagatcaaaggtggcggtggctcgggcggtggtgggtcgggtggcggcggatcgtcagcggtccagctgcagcagtctggacctgagtcggaaaagcctggcgcttcagtgaagatttcctgcaaggcttctggttactcattcactggctacaatatgaactgggtgaagcagaataatggaaagagccttgagtggattggaaatattgatccttattatggtggtactacctacaaccggaagttcaagggcaaggccacattgactgtagacaaatcctccagcacagcctacatgcagctcaagagtctgacatctgaggactctgcagtctattactgtgcaagatcggtcggccctatggactactggggtcaaggaacctcagtcaccgtctcttctgatcaggagcccaaatcttgtgacaaaactcacacatgtccaccgtccccagcacctgaactcctgggtggaccgtcagtcttcctcttccccccaaaacccaaggacaccctcatgatctcccggacccctgaggtcacatgcgtggtggtggacgtgagccacgaagaccctgaggtcaagttcaactggtacgtggacggcgtggaggtgcataatgccaagacaaagccgcgggaggagcagtacaacagcacgtaccgtgtggtcagcgtcctcaccgtcctgcaccaggactggctgaatggcaaggagtacaagtgcaaggtctccaacaaagccctcccagcccccatcgagaaaacaatctccaaagccaaagggcagccccgagaaccacaggtgtacaccctgcccccatcccgggatgagctgaccaagaaccaggtcagcctgacctgcctggtcaaaggcttctatccaagcgacatcgccgtggagtgggagagcaatgggcagccggagaacaactacaagaccacgcctcccgtgctggactccgacggctccttcttcctctacagcaagctcaccgtggacaagagcaggtggcagcaggggaacgtcttctcatgctccgtgatgcatgaggctctgcacaaccactacacgcagaagagcctctccctgtctccgggtaaatgatctaga

SEQ ID NO: 376 - protein, 493 aa, Artificial sequence
  Description of Artificial Sequence: Synthetic amino acid sequence
MVSTAQFLGLLLLWLTGGRCDIQMTQSPASLSASVGETVTITCRTSENVYSYLAWYQQKQGKSPQLLVSFAKTLAEGVPSRFSGSGSGTQFSLKISSLQPEDSGSYFCQHHSDNPWTFGGGTELEIKGGGGSGGGGSGGGGSSAVQLQQSGPESEKPGASVKISCKASGYSFTGYNMNWVKQNNGKSLEWIGNIDPYYGGTTYNRKFKGKATLTVDKSSSTAYMQLKSLTSEDSAVYYCARSVGPMDYWGQGTSVTVSSDQEPKSCDKTHTCPPSPAPELLGGPSVFLFPPKPKDTLMISRTPEVTCVVVDVSHEDPEVKFNWYVDGVEVHNAKTKPREEQYNSTYRVVSVLTVLHQDWLNGKEYKCKVSNKALPAPIEKTISKAKGQPREPQVYTLPPSRDELTKNQVSLTCLVKGFYPSDIAVEWESNGQPENNYKTTPPVLDSDGSFFLYSKLTVDKSRWQQGNVFSCSVMHEALHNHYTQKSLSLSPGK

SEQ ID NO: 377 - DNA, 1506 bp, Artificial sequence
  Description of Artificial Sequence: Synthetic nucleotide sequence
gttgttaagcttgccgccatggtatccacagctcagttccttgggttgctgctgctgtggcttacaggtggcagatgtgacatccagatgactcagtctccagcctccctatctgcatctgtgggagagactgtcaccatcacatgtcgaacaagtgaaaatgtttacagttatttggcttggtatcagcagaaacagggaaaatctcctcagctcctggtctcttttgcaaaaaccttagcagaaggtgtgccatcaaggttcagtggcagtggatcaggcacacagttttctctgaagatcagcagcctgcagcctgaagattctggaagttatttctgtcaacatcattccgataatccgtggacgttcggtggaggcaccgaactggagatcaaaggtggcggtggctcgggcggtggtgggtcgggtggcggcggatcgtcagcggtccagctgcagcagtctggacctgagtcggaaaagcctggcgcttcagtgaagatttcctgcaaggcttctggttactcattcactggctacaatatgaactgggtgaagcagaataatggaaagagccttgagtggattggaaatattgatccttattatggtggtactacctacaaccggaagttcaagggcaaggccacattgactgtagacaaatcctccagcacagcctacatgcagctcaagagtctgacatctgaggactctgcagtctattactgtgcaagatcggtcggccctatggactactggggtcaaggaacctcagtcaccgtctcttctgatcaggagcccaaatcttctgacaaaactcacacatgcccaccgtgcccagcacctgaactcctgggtggaccgtcagtcttcctcttccccccaaaacccaaggacaccctcatgatctcccggacccctgaggtcacatgcgtggtggtggacgtgagccacgaagaccctgaggtcaagttcaactggtacgtggacggcgtggaggtgcataatgccaagacaaagccgcgggaggagcagtacaacagcacgtaccgtgtggtcagcgtcctcaccgtcctgcaccaggactggctgaatggcaaggagtacaagtgcaaggtctccaacaaagccctcccagcccccatcgagaaaacaatctccaaagccaaagggcagccccgagaaccacaggtgtacaccctgcccccatcccgggatgagctgaccaagaaccaggtcagcctgacctgcctggtcaaaggcttctatccaagcgacatcgccgtggagtgggagagcaatgggcagccggagaacaactacaagaccacgcctcccgtgctggactccgacggctccttcttcctctacagcaagctcaccgtggacaagagcaggtggcagcaggggaacgtcttctcatgctccgtgatgcatgaggctctgcacaaccactacacgcagaagagcctctccctgtctccgggtaaatgatctaga

SEQ ID NO: 378 - protein, 493 aa, Artificial sequence
  Description of Artificial Sequence: Synthetic amino acid sequence
MVSTAQFLGLLLLWLTGGRCDIQMTQSPASLSASVGETVTITCRTSENVYSYLAWYQQKQGKSPQLLVSFAKTLAEGVPSRFSGSGSGTQFSLKISSLQPEDSGSYFCQHHSDNPWTFGGGTELEIKGGGGSGGGGSGGGGSSAVQLQQSGPESEKPGASVKISCKASGYSFTGYNMNWVKQNNGKSLEWIGNIDPYYGGTTYNRKFKGKATLTVDKSSSTAYMQLKSLTSEDSAVYYCARSVGPMDYWGQGTSVTVSSDQEPKSSDKTHTCPPCPAPELLGGPSVFLFPPKPKDTLMISRTPEVTCVVVDVSHEDPEVKFNWYVDGVEVHNAKTKPREEQYNSTYRVVSVLTVLHQDWLNGKEYKCKVSNKALPAPIEKTISKAKGQPREPQVYTLPPSRDELTKNQVSLTCLVKGFYPSDIAVEWESNGQPENNYKTTPPVLDSDGSFFLYSKLTVDKSRWQQGNVFSCSVMHEALHNHYTQKSLSLSPGK

SEQ ID NO: 379 - DNA, 1802 bp, Artificial sequence
  Description of Artificial Sequence: Synthetic nucleotide sequence
aagcttgccgccatggtatccacagctcagttccttgggttgctgctgctgtggcttacaggtggcagatgtgacatccagatgactcagtctccagcctccctatctgcatctgtgggagagactgtcaccatcacatgtcgaacaagtgaaaatgtttacagttatttggcttggtatcagcagaaacagggaaaatctcctcagctcctggtctcttttgcaaaaaccttagcagaaggtgtgccatcaaggttcagtggcagtggatcaggcacacagttttctctgaagatcagcagcctgcagcctgaagattctggaagttatttctgtcaacatcattccgataatccgtggacgttcggtggaggcaccgaactggagatcaaaggtggcggtggctcgggcggtggtgggtcgggtggcggcggatcgtcagcggtccagctgcagcagtctggacctgagtcggaaaagcctggcgcttcagtgaagatttcctgcaaggcttctggttactcattcactggctacaatatgaactgggtgaagcagaataatggaaagagccttgagtggattggaaatattgatccttattatggtggtactacctacaaccggaagttcaagggcaaggccacattgactgtagacaaatcctccagcacagcctacatgcagctcaagagtctgacatctgaggactctgcagtctattactgtgcaagatcggtcggccctatggactactggggtcaaggaacctcagtcaccgtctcttctgatcacgttcgacctgtcaacatcactgagcccaccttggagctactccattcatcctgcgaccccaatgcattccactccaccatccagctgtactgcttcatttatggccacatcctaaatgatgtctctgtcagctggctaatggacgatcgggagataactgatacacttgcacaaactgttctaatcaaggaggaaggcaaactagcctctacctgcagtaaactcaacatcactgagcagcaatggatgtctgaaagcaccttcacctgcaaggtcacctcccaaggcgtagactatttggcccacactcggagatgcccagatcatgagccacggggtgtgattacctacctgatcccacccagccccctggacctgtatcaaaacggtgctcccaagcttacctgtctggtggtggacctggaaagcgagaagaatgtcaatgtgacgtggaaccaagagaagaagacttcagtctcagcatcccagtggtacactaagcaccacaataacgccacaactagtatcacctccatcctgcctgtagttgccaaggactggattgaaggctacggctatcagtgcatagtggaccaccctgattttcccaagcccattgtgcgttccatcaccaagaccccaggccagcgctcagcccccgaggtatatgtgttcccaccaccagaggaggagagcgaggacaaacgcacactcacctgtttgatccagaacttcttccctgaggatatctctgtgcagtggctgggggatggcaaactgatctcaaacagccagcacagtaccacaacacccctgaaatccaatggctccaatcaaggcttcttcatcttcagtcgcctagaggtcgccaagacactctggacacagagaaaacagttcacctgccaagtgatccatgaggcacttcagaaacccaggaaactggagaaaacaatatccacaagccttggtaacacctccctccgtccatcctagtaatctagagg

SEQ ID NO: 380 - protein, 592 aa, Artificial sequence
  Description of Artificial Sequence: Synthetic amino acid sequence
MVSTAQFLGLLLLWLTGGRCDIQMTQSPASLSASVGETVTITCRTSENVYSYLAWYQQKQGKSPQLLVSFAKTLAEGVPSRFSGSGSGTQFSLKISSLQPEDSGSYFCQHHSDNPWTFGGGTELEIKGGGGSGGGGSGGGGSSAVQLQQSGPESEKPGASVKISCKASGYSFTGYNMNWVKQNNGKSLEWIGNIDPYYGGTTYNRKFKGKATLTVDKSSSTAYMQLKSLTSEDSAVYYCARSVGPMDYWGQGTSVTVSSDHVRPVNITEPTLELLHSSCDPNAFHSTIQLYCFIYGHILNDVSVSWLMDDREITDTLAQTVLIKEEGKLASTCSKLNITEQQWMSESTFTCKVTSQGVDYLAHTRRCPDHEPRGVITYLIPPSPLDLYQNGAPKLTCLVVDLESEKNVNVTWNQEKKTSVSASQWYTKHHNNATTSITSILPVVAKDWIEGYGYQCIVDHPDFPKPIVRSITKTPGQRSAPEVYVFPPPEEESEDKRTLTCLIQNFFPEDISVQWLGDGKLISNSQHSTTTPLKSNGSNQGFFIFSRLEVAKTLWTQRKQFTCQVIHEALQKPRKLEKTISTSLGNTSLRPS

SEQ ID NO: 381 - DNA, 1525 bp, Artificial sequence
  Description of Artificial Sequence: Synthetic nucleotide sequence
aagcttgccgccatggtatccacagctcagttccttgggttgctgctgctgtggcttacaggtggcagatgtgacatccagatgactcagtctccagcctccctatctgcatctgtgggagagactgtcaccatcacatgtcgaacaagtgaaaatgtttacagttatttggcttggtatcagcagaaacagggaaaatctcctcagctcctggtctcttttgcaaaaaccttagcagaaggtgtgccatcaaggttcagtggcagtggatcaggcacacagttttctctgaagatcagcagcctgcagcctgaagattctggaagttatttctgtcaacatcattccgataatccgtggacgttcggtggaggcaccgaactggagatcaaaggtggcggtggctcgggcggtggtgggtcgggtggcggcggatcgtcagcggtccagctgcagcagtctggacctgagtcggaaaagcctggcgcttcagtgaagatttcctgcaaggcttctggttactcattcactggctacaatatgaactgggtgaagcagaataatggaaagagccttgagtggattggaaatattgatccttattatggtggtactacctacaaccggaagttcaagggcaaggccacattgactgtagacaaatcctccagcacagcctacatgcagctcaagagtctgacatctgaggactctgcagtctattactgtgcaagatcggtcggccctatggactactggggtcaaggaacctcagtcaccgtctcttctgatcacatctgttctcctcctactactcctcctccaccttcctgccagcccagcctgtcactgcagcggccagctcttgaggacctgctcctgggttcagatgccagcatcacatgtactctgaatggcctgagagatcctgagggagctgtcttcacctgggagccctccactgggaaggatgcagtgcagaagaaagctgtgcagaattcctgcggctgctacagtgtgtccagcgtcctgcctggctgtgctgagcgctggaacagtggcgcatcattcaagtgcacagttacccatcctgagtctgacaccttaactggcacaattgccaaagtcacagtgaacaccttcccaccccaggtccacctgctaccgccgccgtcggaggagctggccctgaatgagctcgtgtccctgacatgcctggtgcgagctttcaaccctaaagaagtgctggtgcgatggctgcatggaaatgaggagctgtccccagaaagctacctagtgtttgagcccctaaaggagccaggcgagggagccaccacctacctggtgacaagcgtgttgcgtgtatcagctgaaatctggaaacagggtgaccagtactcctgcatggtgggccacgaggccttgcccatgaacttcacccagaagaccatcgaccgtctgtcgggtaaacccaccaatgtcagcgtgtctgtgatcatgtcagagggagattgataatctagat

SEQ ID NO: 382 - protein, 500 aa, Artificial sequence
  Description of Artificial Sequence: Synthetic amino acid sequence
MVSTAQFLGLLLLWLTGGRCDIQMTQSPASLSASVGETVTITCRTSENVYSYLAWYQQKQGKSPQLLVSFAKTLAEGVPSRFSGSGSGTQFSLKISSLQPEDSGSYFCQHHSDNPWTFGGGTELEIKGGGGSGGGGSGGGGSSAVQLQQSGPESEKPGASVKISCKASGYSFTGYNMNWVKQNNGKSLEWIGNIDPYYGGTTYNRKFKGKATLTVDKSSSTAYMQLKSLTSEDSAVYYCARSVGPMDYWGQGTSVTVSSDHICSPPTTPPPPSCQPSLSLQRPALEDLLLGSDASITCTLNGLRDPEGAVFTWEPSTGKDAVQKKAVQNSCGCYSVSSVLPGCAERWNSGASFKCTVTHPESDTLTGTIAKVTVNTFPPQVHLLPPPSEELALNELVSLTCLVRAFNPKEVLVRWLHGNEELSPESYLVFEPLKEPGEGATTYLVTSVLRVSAEIWKQGDQYSCMVGHEALPMNFTQKTIDRLSGKPTNVSVSVIMSEGD

SEQ ID NO: 383 - DNA, 1782 bp, Artificial sequence
  Description of Artificial Sequence: Synthetic nucleotide sequence
aagcttgccgccatggtatccacagctcagttccttgggttgctgctgctgtggcttacaggtggcagatgtgacatccagatgactcagtctccagcctccctatctgcatctgtgggagagactgtcaccatcacatgtcgaacaagtgaaaatgtttacagttatttggcttggtatcagcagaaacagggaaaatctcctcagctcctggtctcttttgcaaaaaccttagcagaaggtgtgccatcaaggttcagtggcagtggatcaggcacacagttttctctgaagatcagcagcctgcagcctgaagattctggaagttatttctgtcaacatcattccgataatccgtggacgttcggtggaggcaccgaactggagatcaaaggtggcggtggctcgggcggtggtgggtcgggtggcggcggatcgtcagcggtccagctgcagcagtctggacctgagtcggaaaagcctggcgcttcagtgaagatttcctgcaaggcttctggttactcattcactggctacaatatgaactgggtgaagcagaataatggaaagagccttgagtggattggaaatattgatccttattatggtggtactacctacaaccggaagttcaagggcaaggccacattgactgtagacaaatcctccagcacagcctacatgcagctcaagagtctgacatctgaggactctgcagtctattactgtgcaagatcggtcggccctatggactactggggtcaaggaacctcagtcaccgtctcttctgatcacgtctgctccagggacttcaccccgcccaccgtgaagatcttacagtcgtcctgcgacggcggcgggcacttccccccgaccatccagctcctgtgcctcgtctctgggtacaccccagggactatcaacatcacctggctggaggacgggcaggtcatggacgtggacttgtccaccgcctctaccacgcaggagggtgagctggcctccacacaaagcgagctcaccctcagccagaagcactggctgtcagaccgcacctacacctgccaggtcacctatcaaggtcacacctttgaggacagcaccaagaagtgtgcagattccaacccgagaggggtgagcgcctacctaagccggcccagcccgttcgacctgttcatccgcaagtcgcccacgatcacctgtctggtggtggacctggcacccagcaaggggaccgtgaacctgacctggtcccgggccagtgggaagcctgtgaaccactccaccagaaaggaggagaagcagcgcaatggcacgttaaccgtcacgtccaccctgccggtgggcacccgagactggatcgagggggagacctaccagtgcagggtgacccacccccacctgcccagggccctcatgcggtccacgaccaagaccagcggcccgcgtgctgccccggaagtctatgcgtttgcgacgccggagtggccggggagccgggacaagcgcaccctcgcctgcctgatccagaacttcatgcctgaggacatctcggtgcagtggctgcacaacgaggtgcagctcccggacgcccggcacagcacgacgcagccccgcaagaccaagggctccggcttcttcgtcttcagccgcctggaggtgaccagggccgaatgggagcagaaagatgagttcatctgccgtgcagtccatgaggcagcgagcccctcacagaccgtccagcgagcggtgtctgtaaatcccggtaaatgataatctaga

SEQ ID NO: 384 - protein, 586 aa, Artificial sequence
  Description of Artificial Sequence: Synthetic amino acid sequence
MVSTAQFLGLLLLWLTGGRCDIQMTQSPASLSASVGETVTITCRTSENVYSYLAWYQQKQGKSPQLLVSFAKTLAEGVPSRFSGSGSGTQFSLKISSLQPEDSGSYFCQHHSDNPWTFGGGTELEIKGGGGSGGGGSGGGGSSAVQLQQSGPESEKPGASVKISCKASGYSFTGYNMNWVKQNNGKSLEWIGNIDPYYGGTTYNRKFKGKATLTVDKSSSTAYMQLKSLTSEDSAVYYCARSVGPMDYWGQGTSVTVSSDHVCSRDFTPPTVKILQSSCDGGGHFPPTIQLLCLVSGYTPGTINITWLEDGQVMDVDLSTASTTQEGELASTQSELTLSQKHWLSDRTYTCQVTYQGHTFEDSTKKCADSNPRGVSAYLSRPSPFDLFIRKSPTITCLVVDLAPSKGTVNLTWSRASGKPVNHSTRKEEKQRNGTLTVTSTLPVGTRDWIEGETYQCRVTHPHLPRALMRSTTKTSGPRAAPEVYAFATPEWPGSRDKRTLACLIQNFMPEDISVQWLHNEVQLPDARHSTTQPRKTKGSGFFVFSRLEVTRAEWEQKDEFICRAVHEAASPSQTVQRAVSVNPGK

SEQ ID NO: 385 - DNA, 1539 bp, Artificial sequence
  Description of Artificial Sequence: Synthetic nucleotide sequence
atggtatccacagctcagttccttgggttgctgctgctgtggcttacaggtggcagatgtgacatccagatgactcagtctccagcctccctatctgcatctgtgggagagactgtcaccatcacatgtcgaacaagtgaaaatgtttacagttatttggcttggtatcagcagaaacagggaaaatctcctcagctcctggtctcttttgcaaaaaccttagcagaaggtgtgccatcaaggttcagtggcagtggatcaggcacacagttttctctgaagatcagcagcctgcagcctgaagattctggaagttatttctgtcaacatcattccgataatccgtggacgttcggtggaggcaccgaactggagatcaaaggtggcggtggctcgggcggtggtgggtcgggtggcggcggatcgtcagcggtccagctgcagcagtctggacctgagtcggaaaagcctggcgcttcagtgaagatttcctgcaaggcttctggttactcattcactggctacaatatgaactgggtgaagcagaataatggaaagagccttgagtggattggaaatattgatccttattatggtggtactacctacaaccggaagttcaagggcaaggccacattgactgtagacaaatcctccagcacagcctacatgcagctcaagagtctgacatctgaggactctgcagtctattactgtgcaagatcggtcggccctatggactactggggtcaaggaacctcagtcaccgtctcttctgatcagccagttccctcaactccacctaccccatctccctcaactccacctaccccatctccctcatgctgccacccccgactgtcactgcaccgaccggccctcgaggacctgctcttaggttcagaagcgatcctcacgtgcacactgaccggcctgagagatgcctcaggtgtcaccttcacctggacgccctcaagtgggaagagcgctgttcaaggaccacctgaccgtgacctctgtggctgctacagcgtgtccagtgtcctgccgggctgtgccgagccatggaaccatgggaagaccttcacttgcactgctgcctaccccgagtccaagaccccgctaaccgccaccctctcaaaatccggaaacacattccggcccgaggtccacctgctgccgccgccgtcggaggagctggccctgaacgagctggtgacgctgacgtgcctggcacgtggcttcagccccaaggatgtgctggttcgctggctgcaggggtcacaggagctgccccgcgagaagtacctgacttgggcatcccggcaggagcccagccagggcaccaccaccttcgctgtgaccagcatactgcgcgtggcagccgaggactggaagaagggggacaccttctcctgcatggtgggccacgaggccctgccgctggccttcacacagaagaccatcgaccgcttggcgggtaaacccacccatgtcaatgtgtctgttgtcatggcggaggtggactgataatctaga

SEQ ID NO: 386 - protein, 296 aa, Artificial sequence
  Description of Artificial Sequence: Synthetic amino acid sequence
MVSTAQFLGLLLLWLTGGRCDIQMTQSPASLSASVGETVTITCRTSENVYSYLAWYQQKQGKSPQLLVSFAKTLAEGVPSRFSGSGSGTQFSLKISSLQPEDSGSYFCQHHSDNPWTFGGGTELEIKGGGGSGGGGSGGGGSSAVQLQQSGPESEKPGASVKISCKASGYSFTGYNMNWVKQNNGKSLEWIGNIDPYYGGTTYNRKFKGKATLTVDKSSSTAYMQLKSLTSEDSAVYYCARSVGPMDYWGQGTSVTVSSDQPVPSTPPTPSPSTPPTPSPSCCHPRLSLHRPALED

SEQ ID NO: 387 - DNA, 453 bp, Artificial sequence
  Description of Artificial Sequence: Synthetic nucleotide sequence
aagcttgccgccatggagacagacacactcctgctatgggtgctgctgctctgggttccaggctccactggtgacattgtgctgacccaatctccagcttctttggctgtgtctctagggcagagggccaccatctcctgcaaggccagccaaagtgttgattatgatggtgatagttatttgaactggtaccaacagattccaggacagccacccaaactcctcatctatgatgcatccaatctagtttctgggatcccacccaggtttagtggcagtgggtctgggacagacttcaccctcaacatccatcctgtggagaaggtggatgctgcaacctatcactgtcagcaaagtactgaggatccgtggacgttcggtggaggcaccaagctggaaatcaaaggtggcggtggctcgggcggtggtgggtcgggtggcggcgggagctcg

SEQ ID NO: 388 - protein, 147 aa, Artificial sequence
  Description of Artificial Sequence: Synthetic amino acid sequence
METDTLLLWVLLLWVPGSTGDIVLTQSPASLAVSLGQRATISCKASQSVDYDGDSYLNWYQQIPGQPPKLLIYDASNLVSGIPPRFSGSGSGTDFTLNIHPVEKVDAATYHCQQSTEDPWTFGGGTKLEIKGGGGSGGGGSGGGGSS

SEQ ID NO: 389 - DNA, 387 bp, Artificial sequence
  Description of Artificial Sequence: Synthetic nucleotide sequence
gggagctcgcaggttcagctgcagcagtctggggctgagctggtgaggcctgggtcctcagtgaagatttcctgcaaggcttctggctatgcattcagtagctactggatgaactgggtgaagcagaggcctggacagggtcttgagtggattggacagatttggcctggagatggtgatactaactacaatggaaagttcaagggtaaagccactctgactgcagacgaatcctccagcacagcctacatgcaactcagcagcctagcatctgaggactctgcggtctatttctgtgcaagacgggagactacgacggtaggccgttattactatgctatggactactggggtcaaggaacctcagtcaccgtctcctctgatcag

SEQ ID NO: 390 - protein, 129 aa, Artificial sequence
  Description of Artificial Sequence: Synthetic amino acid sequence
GSSQVQLQQSGAELVRPGSSVKISCKASGYAFSSYWMNWVKQRPGQGLEWIGQIWPGDGDTNYNGKFKGKATLTADESSSTAYMQLSSLASEDSAVYFCARRETTTVGRYYYAMDYWGQGTSVTVSSDQ

SEQ ID NO: 391 - DNA, 831 bp, Artificial sequence
  Description of Artificial Sequence: Synthetic nucleotide sequence
aagcttgccgccatggagacagacacactcctgctatgggtgctgctgctctgggttccaggctccactggtgacattgtgctgacccaatctccagcttctttggctgtgtctctagggcagagggccaccatctcctgcaaggccagccaaagtgttgattatgatggtgatagttatttgaactggtaccaacagattccaggacagccacccaaactcctcatctatgatgcatccaatctagtttctgggatcccacccaggtttagtggcagtgggtctgggacagacttcaccctcaacatccatcctgtggagaaggtggatgctgcaacctatcactgtcagcaaagtactgaggatccgtggacgttcggtggaggcaccaagctggaaatcaaaggtggcggtggctcgggcggtggtgggtcgggtggcggcggatcgtcacaggttcagctgcagcagtctggggctgagctggtgaggcctgggtcctcagtgaagatttcctgcaaggcttctggctatgcattcagtagctactggatgaactgggtgaagcagaggcctggacagggtcttgagtggattggacagatttggcctggagatggtgatactaactacaatggaaagttcaagggtaaagccactctgactgcagacgaatcctccagcacagcctacatgcaactcagcagcctagcatctgaggactctgcggtctatttctgtgcaagacgggagactacgacggtaggccgttattactatgctatggactactggggtcaaggaacctcagtcaccgtctcctctgatcag

SEQ ID NO: 392 - protein, 273 aa, Artificial sequence
  Description of Artificial Sequence: Synthetic amino acid sequence
METDTLLLWVLLLWVPGSTGDIVLTQSPASLAVSLGQRATISCKASQSVDYDGDSYLNWYQQIPGQPPKLLIYDASNLVSGIPPRFSGSGSGTDFTLNIHPVEKVDAATYHCQQSTEDPWTFGGGTKLEIKGGGGSGGGGSGGGGSSQVQLQQSGAELVRPGSSVKISCKASGYAFSSYWMNWVKQRPGQGLEWIGQIWPGDGDTNYNGKFKGKATLTADESSSTAYMQLSSLASEDSAVYFCARRETTTVGRYYYAMDYWGQGTSVTVSSDQ

SEQ ID NO: 393 - DNA, 387 bp, Artificial sequence
  Description of Artificial Sequence: Synthetic nucleotide sequence
gggagctcgcaggttcagctgcagcagtctggggctgagtcggtgaggcctgggtcctcagtgaagatttcctgcaaggcttctggctatgcattcagtagctactggatgaactgggtgaagcagaggcctggacagggtcttgagtggattggacagatttggcctggagatggtgatactaactacaatggaaagttcaagggtaaagccactctgactgcagacgaatcctccagcacagcctacatgcaactcagcagcctagcatctgaggactctgcggtctatttctgtgcaagacgggagactacgacggtaggccgttattactatgctatggactactggggtcaaggaacctcagtcaccgtctcctctgatcag

SEQ ID NO: 394 - protein, 129 aa, Artificial sequence
  Description of Artificial Sequence: Synthetic amino acid sequence
GSSQVQLQQSGAESVRPGSSVKISCKASGYAFSSYWMNWVKQRPGQGLEWIGQIWPGDGDTNYNGKFKGKATLTADESSSTAYMQLSSLASEDSAVYFCARRETTTVGRYYYAMDYWGQGTSVTVSSDQ

SEQ ID NO: 395 - DNA, 831 bp, Artificial sequence
  Description of Artificial Sequence: Synthetic nucleotide sequence
aagcttgccgccatggagacagacacactcctgctatgggtgctgctgctctgggttccaggctccactggtgacattgtgctgacccaatctccagcttctttggctgtgtctctagggcagagggccaccatctcctgcaaggccagccaaagtgttgattatgatggtgatagttatttgaactggtaccaacagattccaggacagccacccaaactcctcatctatgatgcatccaatctagtttctgggatcccacccaggtttagtggcagtgggtctgggacagacttcaccctcaacatccatcctgtggagaaggtggatgctgcaacctatcactgtcagcaaagtactgaggatccgtggacgttcggtggaggcaccaagctggaaatcaaaggtggcggtggctcgggcggtggtgggtcgggtggcggcgggagctcgcaggttcagctgcagcagtctggggctgagtcggtgaggcctgggtcctcagtgaagatttcctgcaaggcttctggctatgcattcagtagctactggatgaactgggtgaagcagaggcctggacagggtcttgagtggattggacagatttggcctggagatggtgatactaactacaatggaaagttcaagggtaaagccactctgactgcagacgaatcctccagcacagcctacatgcaactcagcagcctagcatctgaggactctgcggtctatttctgtgcaagacgggagactacgacggtaggccgttattactatgctatggactactggggtcaaggaacctcagtcaccgtctcctctgatcag

SEQ ID NO: 396 - protein, 273 aa, Artificial sequence
  Description of Artificial Sequence: Synthetic amino acid sequence
METDTLLLWVLLLWVPGSTGDIVLTQSPASLAVSLGQRATISCKASQSVDYDGDSYLNWYQQIPGQPPKLLIYDASNLVSGIPPRFSGSGSGTDFTLNIHPVEKVDAATYHCQQSTEDPWTFGGGTKLEIKGGGGSGGGGSGGGGSSQVQLQQSGAESVRPGSSVKISCKASGYAFSSYWMNWVKQRPGQGLEWIGQIWPGDGDTNYNGKFKGKATLTADESSSTAYMQLSSLASEDSAVYFCARRETTTVGRYYYAMDYWGQGTSVTVSSDQ

SEQ ID NO: 397 - DNA, 1587 bp, Artificial sequence
  Description of Artificial Sequence: Synthetic nucleotide sequence
aagcttgccgccatggagacagacacactcctgctatgggtgctgctgctctgggttccaggctccactggtgacattgtgctgacccaatctccagcttctttggctgtgtctctagggcagagggccaccatctcctgcaaggccagccaaagtgttgattatgatggtgatagttatttgaactggtaccaacagattccaggacagccacccaaactcctcatctatgatgcatccaatctagtttctgggatcccacccaggtttagtggcagtgggtctgggacagacttcaccctcaacatccatcctgtggagaaggtggatgctgcaacctatcactgtcagcaaagtactgaggatccgtggacgttcggtggaggcaccaagctggaaatcaaaggtggcggtggctcgggcggtggtgggtcgggtggcggcgggagctcgcaggttcagctgcagcagtctggggctgagtcggtgaggcctgggtcctcagtgaagatttcctgcaaggcttctggctatgcattcagtagctactggatgaactgggtgaagcagaggcctggacagggtcttgagtggattggacagatttggcctggagatggtgatactaactacaatggaaagttcaagggtaaagccactctgactgcagacgaatcctccagcacagcctacatgcaactcagcagcctagcatctgaggactctgcggtctatttctgtgcaagacgggagactacgacggtaggccgttattactatgctatggactactggggtcaaggaacctcagtcaccgtctcctctgatcagccagttccctcaactccacctaccccatctccctcaactccacctaccccatctccctcatgctgccacccccgactgtcactgcaccgaccggccctcgaggacctgctcttaggttcagaagcgatcctcacgtgcacactgaccggcctgagagatgcctcaggtgtcaccttcacctggacgccctcaagtgggaagagcgctgttcaaggaccacctgaccgtgacctctgtggctgctacagcgtgtccagtgtcctgccgggctgtgccgagccatggaaccatgggaagaccttcacttgcactgctgcctaccccgagtccaagaccccgctaaccgccaccctctcaaaatccggaaacacattccggcccgaggtccacctgctgccgccgccgtcggaggagctggccctgaacgagctggtgacgctgacgtgcctggcacgtggcttcagccccaaggatgtgctggttcgctggctgcaggggtcacaggagctgccccgcgagaagtacctgacttgggcatcccggcaggagcccagccagggcaccaccaccttcgctgtgaccagcatactgcgcgtggcagccgaggactggaagaagggggacaccttctcctgcatggtgggccacgaggccctgccgctggccttcacacagaagaccatcgaccgcttggcgggtaaacccacccatgtcaatgtgtctgttgtcatggcggaggtggactgataatctaga

SEQ ID NO: 398 - protein, 521 aa, Artificial sequence
  Description of Artificial Sequence: Synthetic amino acid sequence
METDTLLLWVLLLWVPGSTGDIVLTQSPASLAVSLGQRATISCKASQSVDYDGDSYLNWYQQIPGQPPKLLIYDASNLVSGIPPRFSGSGSGTDFTLNIHPVEKVDAATYHCQQSTEDPWTFGGGTKLEIKGGGGSGGGGSGGGGSSQVQLQQSGAESVRPGSSVKISCKASGYAFSSYWMNWVKQRPGQGLEWIGQIWPGDGDTNYNGKFKGKATLTADESSSTAYMQLSSLASEDSAVYFCARRETTTVGRYYYAMDYWGQGTSVTVSSDQPVPSTPPTPSPSTPPTPSPSCCHPRLSLHRPALEDLLLGSEAILTCTLTGLRDASGVTFTWTPSSGKSAVQGPPDRDLCGCYSVSSVLPGCAEPWNHGKTFTCTAAYPESKTPLTATLSKSGNTFRPEVHLLPPPSEELALNELVTLTCLARGFSPKDVLVRWLQGSQELPREKYLTWASRQEPSQGTTTFAVTSILRVAAEDWKKGDTFSCMVGHEALPLAFTQKTIDRLAGKPTHVNVSVVMAEVD

SEQ ID NO: 399 - DNA, 1536 bp, Artificial sequence
  Description of Artificial Sequence: Synthetic nucleotide sequence
aagcttgccgccatggagacagacacactcctgctatgggtgctgctgctctgggttccaggctccactggtgacattgtgctgacccaatctccagcttctttggctgtgtctctagggcagagggccaccatctcctgcaaggccagccaaagtgttgattatgatggtgatagttatttgaactggtaccaacagattccaggacagccacccaaactcctcatctatgatgcatccaatctagtttctgggatcccacccaggtttagtggcagtgggtctgggacagacttcaccctcaacatccatcctgtggagaaggtggatgctgcaacctatcactgtcagcaaagtactgaggatccgtggacgttcggtggaggcaccaagctggaaatcaaaggtggcggtggctcgggcggtggtgggtcgggtggcggcggatcgtcacaggttcagctgcagcagtctggggctgagctggtgaggcctgggtcctcagtgaagatttcctgcaaggcttctggctatgcattcagtagctactggatgaactgggtgaagcagaggcctggacagggtcttgagtggattggacagatttggcctggagatggtgatactaactacaatggaaagttcaagggtaaagccactctgactgcagacgaatcctccagcacagcctacatgcaactcagcagcctagcatctgaggactctgcggtctatttctgtgcaagacgggagactacgacggtaggccgttattactatgctatggactactggggtcaaggaacctcagtcaccgtctcctctgatcaggagcccaaatcttctgacaaaactcacacatccccaccgtcctcagcacctgaactcctgggtggaccgtcagtcttcctcttccccccaaaacccaaggacaccctcatgatctcccggacccctgaggtcacatgcgtggtggtggacgtgagccacgaagaccctgaggtcaagttcaactggtacgtggacggcgtggaggtgcataatgccaagacaaagccgcgggaggagcagtacaacagcacgtaccgtgtggtcagcgtcctcaccgtcctgcaccaggactggctgaatggcaaggagtacaagtgcaaggtctccaacaaagccctcccagcccccatcgagaaaaccatctccaaagccaaagggcagccccgagaaccacaggtgtacaccctgcccccatcccgggatgagctgaccaagaaccaggtcagcctgacctgcctggtcaaaggcttctatccaagcgacatcgccgtggagtgggagagcaatgggcagccggagaacaactacaagaccacgcctcccgtgctggactccgacggctccttcttcctctacagcaagctcaccgtggacaagagcaggtggcagcaggggaacgtcttctcatgctccgtgatgcatgaggctctgcacaaccactacacgcagaagagcctctccctgtctccgggtaaatgatctaga

SEQ ID NO: 400 - protein, 505 aa, Artificial sequence
  Description of Artificial Sequence: Synthetic amino acid sequence
METDTLLLWVLLLWVPGSTGDIVLTQSPASLAVSLGQRATISCKASQSVDYDGDSYLNWYQQIPGQPPKLLIYDASNLVSGIPPRFSGSGSGTDFTLNIHPVEKVDAATYHCQQSTEDPWTFGGGTKLEIKGGGGSGGGGSGGGGSSQVQLQQSGAELVRPGSSVKISCKASGYAFSSYWMNWVKQRPGQGLEWIGQIWPGDGDTNYNGKFKGKATLTADESSSTAYMQLSSLASEDSAVYFCARRETTTVGRYYYAMDYWGQGTSVTVSSDQEPKSSDKTHTSPPSSAPELLGGPSVFLFPPKPKDTLMISRTPEVTCVVVDVSHEDPEVKFNWYVDGVEVHNAKTKPREEQYNSTYRVVSVLTVLHQDWLNGKEYKCKVSNKALPAPIEKTISKAKGQPREPQVYTLPPSRDELTKNQVSLTCLVKGFYPSDIAVEWESNGQPENNYKTTPPVLDSDGSFFLYSKLTVDKSRWQQGNVFSCSVMHEALHNHYTQKSLSLSPGK

SEQ ID NO: 401 - DNA, 1536 bp, Artificial sequence
  Description of Artificial Sequence: Synthetic nucleotide sequence
aagcttgccgccatggagacagacacactcctgctatgggtgctgctgctctgggttccaggctccactggtgacattgtgctgacccaatctccagcttctttggctgtgtctctagggcagagggccaccatctcctgcaaggccagccaaagtgttgattatgatggtgatagttatttgaactggtaccaacagattccaggacagccacccaaactcctcatctatgatgcatccaatctagtttctgggatcccacccaggtttagtggcagtgggtctgggacagacttcaccctcaacatccatcctgtggagaaggtggatgctgcaacctatcactgtcagcaaagtactgaggatccgtggacgttcggtggaggcaccaagctggaaatcaaaggtggcggtggctcgggcggtggtgggtcgggtggcggcgggagctcgcaggttcagctgcagcagtctggggctgagtcggtgaggcctgggtcctcagtgaagatttcctgcaaggcttctggctatgcattcagtagctactggatgaactgggtgaagcagaggcctggacagggtcttgagtggattggacagatttggcctggagatggtgatactaactacaatggaaagttcaagggtaaagccactctgactgcagacgaatcctccagcacagcctacatgcaactcagcagcctagcatctgaggactctgcggtctatttctgtgcaagacgggagactacgacggtaggccgttattactatgctatggactactggggtcaaggaacctcagtcaccgtctcctctgatcaggagcccaaatcttctgacaaaactcacacatccccaccgtcctcagcacctgaactcctggggggaccgtcagtcttcctcttccccccaaaacccaaggacaccctcatgatctcccggacccctgaggtcacatgcgtggtggtggacgtgagccacgaagaccctgaggtcaagttcaactggtacgtggacggcgtggaggtgcataatgccaagacaaagccgcgggaggagcagtacaacagcacgtaccgtgtggtcagcgtcctcaccgtcctgcaccaggactggctgaatggcaaggagtacaagtgcaaggtctccaacaaagccctcccagcccccatcgagaaaacaatctccaaagccaaagggcagccccgagaaccacaggtgtacaccctgcccccatcccgggatgagctgaccaagaaccaggtcagcctgacctgcctggtcaaaggcttctatcccagcgacatcgccgtggagtgggagagcaatgggcagccggagaacaactacaagaccacgcctcccgtgctggactccgacggctccttcttcctctacagcaagctcaccgtggacaagagcaggtggcagcaggggaacgtcttctcatgctccgtgatgcatgaggctctgcacaaccactacacgcagaagagcctctccctgtctccgggtaaatgatctaga

SEQ ID NO: 402 - protein, 505 aa, Artificial sequence
  Description of Artificial Sequence: Synthetic amino acid sequence
METDTLLLWVLLLWVPGSTGDIVLTQSPASLAVSLGQRATISCKASQSVDYDGDSYLNWYQQIPGQPPKLLIYDASNLVSGIPPRFSGSGSGTDFTLNIHPVEKVDAATYHCQQSTEDPWTFGGGTKLEIKGGGGSGGGGSGGGGSSQVQLQQSGAESVRPGSSVKISCKASGYAFSSYWMNWVKQRPGQGLEWIGQIWPGDGDTNYNGKFKGKATLTADESSSTAYMQLSSLASEDSAVYFCARRETTTVGRYYYAMDYWGQGTSVTVSSDQEPKSSDKTHTSPPSSAPELLGGPSVFLFPPKPKDTLMISRTPEVTCVVVDVSHEDPEVKFNWYVDGVEVHNAKTKPREEQYNSTYRVVSVLTVLHQDWLNGKEYKCKVSNKALPAPIEKTISKAKGQPREPQVYTLPPSRDELTKNQVSLTCLVKGFYPSDIAVEWESNGQPENNYKTTPPVLDSDGSFFLYSKLTVDKSRWQQGNVFSCSVMHEALHNHYTQKSLSLSPGK

SEQ ID NO: 403 - DNA, 438 bp, Artificial sequence
  Description of Artificial Sequence: Synthetic nucleotide sequence
atggattttcaagtgcagattttcagcttcctgctaatcagtgcttcagtcataatgtccagaggacaaattgttctctcccagtctccagcaatcctgtctgcatctccaggggagaaggtcacattgacttgcagggccagctcaagtgtaagtttcatgaactggtaccagcagaagccaggatcctcccccaaaccctggatttatgccacatccaatttggcttctgagttccctggtcgcttcagtggcgagtggtctgggacctcttactctctcgcaatcagcagagtggaggctgaagatgctgccacttattactgccagcagtggaatagtaacccactcacgttcggtgctgggaccaagctggagctgaaagagctctctggtggcggtggctcgggcggtggtgggtcgggtggcggcggatct

SEQ ID NO: 404 - protein, 146 aa, Artificial sequence
  Description of Artificial Sequence: Synthetic amino acid sequence
MDFQVQIFSFLLISASVIMSRGQIVLSQSPAILSASPGEKVTLTCRASSSVSFMNWYQQKPGSSPKPWIYATSNLASEFPGRFSGEWSGTSYSLAISRVEAEDAATYYCQQWNSNPLTFGAGTKLELKELSGGGGSGGGGSGGGGS

SEQ ID NO: 405 - DNA, 365 bp, Artificial sequence
  Description of Artificial Sequence: Synthetic nucleotide sequence
cagatccagttggtgcagtctggacctgagctgaagaagcctggagagacagtcaagatctcctgcaaggcttctgggtataccttcacaaactatggaatgaactgggtgaagcaggctccaggaaagggtttaaagtggatgggctggataaacacctacactggacagccaacatatgctgatgacttcaagggacggtttgccttctctttggaaacctctgcctacactgcctatttgcagatcaacaacctcaaaaatgaggacatggctacatatttctgtgcaagatttagctatggtaactcacgttacgctgactactggggccaaggcaccactctcacagtctcctctgatca

SEQ ID NO: 406 - protein, 121 aa, Artificial sequence
  Description of Artificial Sequence: Synthetic amino acid sequence
QIQLVQSGPELKKPGETVKISCKASGYTFTNYGMNWVKQAPGKGLKWMGWINTYTGQPTYADDFKGRFAFSLETSAYTAYLQINNLKNEDMATYFCARFSYGNSRYADYWGQGTTLTVSSD

SEQ ID NO: 407 - DNA, 806 bp, Artificial sequence
  Description of Artificial Sequence: Synthetic nucleotide sequence
atggattttcaagtgcagattttcagcttcctgctaatcagtgcttcagtcataatgtccagaggacaaattgttctctcccagtctccagcaatcctgtctgcatctccaggggagaaggtcacattgacttgcagggccagctcaagtgtaagtttcatgaactggtaccagcagaagccaggatcctcccccaaaccctggatttatgccacatccaatttggcttctgagttccctggtcgcttcagtggcgagtggtctgggacctcttactctctcgcaatcagcagagtggaggctgaagatgctgccacttattactgccagcagtggaatagtaacccactcacgttcggtgctgggaccaagctggagctgaaagagctctctggtggcggtggctcgggcggtggtgggtcgggtggcggcggatctctgcagatccagttggtgcagtctggacctgagctgaagaagcctggagagacagtcaagatctcctgcaaggcttctgggtataccttcacaaactatggaatgaactgggtgaagcaggctccaggaaagggtttaaagtggatgggctggataaacacctacactggacagccaacatatgctgatgacttcaagggacggtttgccttctctttggaaacctctgcctacactgcctatttgcagatcaacaacctcaaaaatgaggacatggctacatatttctgtgcaagatttagctatggtaactcacgttacgctgactactggggccaaggcaccactctcacagtctcctctgatca

SEQ ID NO: 408 - protein, 268 aa, Artificial sequence
  Description of Artificial Sequence: Synthetic amino acid sequence
MDFQVQIFSFLLISASVIMSRGQIVLSQSPAILSASPGEKVTLTCRASSSVSFMNWYQQKPGSSPKPWIYATSNLASEFPGRFSGEWSGTSYSLAISRVEAEDAATYYCQQWNSNPLTFGAGTKLELKELSGGGGSGGGGSGGGGSLQIQLVQSGPELKKPGETVKISCKASGYTFTNYGMNWVKQAPGKGLKWMGWINTYTGQPTYADDFKGRFAFSLETSAYTAYLQINNLKNEDMATYFCARFSYGNSRYADYWGQGTTLTVSSD

SEQ ID NO: 409 - DNA, 368 bp, Artificial sequence
  Description of Artificial Sequence: Synthetic nucleotide sequence
ctgcagatccagttggtgcagtctggacctgagtcgaagaagcctggagagacagtcaagatctcctgcaaggcttctgggtataccttcacaaactatggaatgaactgggtgaagcaggctccaggaaagggtttaaagtggatgggctggataaacacctacactggacagccaacatatgctgatgacttcaagggacggtttgccttctctttggaaacctctgcctacactgcctatttgcagatcaacaacctcaaaaatgaggacatggctacatatttctgtgcaagatttagctatggtaactcacgttacgctgactactggggccaaggcaccactctcacagtctcctctgatca

SEQ ID NO: 410 - protein, 121 aa, Artificial sequence
  Description of Artificial Sequence: Synthetic amino acid sequence
QIQLVQSGPESKKPGETVKISCKASGYTFTNYGMNWVKQAPGKGLKWMGWINTYTGQPTYADDFKGRFAFSLETSAYTAYLQINNLKNEDMATYFCARFSYGNSRYADYWGQGTTLTVSSD

SEQ ID NO: 411 - DNA, 818 bp, Artificial sequence
  Description of Artificial Sequence: Synthetic nucleotide sequence
aagcttgttgttatggattttcaagtgcagattttcagcttcctgctaatcagtgcttcagtcataatgtccagaggacaaattgttctctcccagtctccagcaatcctgtctgcatctccaggggagaaggtcacattgacttgcagggccagctcaagtgtaagtttcatgaactggtaccagcagaagccaggatcctcccccaaaccctggatttatgccacatccaatttggcttctgagttccctggtcgcttcagtggcgagtggtctgggacctcttactctctcgcaatcagcagagtggaggctgaagatgctgccacttattactgccagcagtggaatagtaacccactcacgttcggtgctgggaccaagctggagctgaaagagctctctggtggcggtggctcgggcggtggtgggtcgggtggcggcggatctctgcagatccagttggtgcagtctggacctgagtcgaagaagcctggagagacagtcaagatctcctgcaaggcttctgggtataccttcacaaactatggaatgaactgggtgaagcaggctccaggaaagggtttaaagtggatgggctggataaacacctacactggacagccaacatatgctgatgacttcaagggacggtttgccttctctttggaaacctctgcctacactgcctatttgcagatcaacaacctcaaaaatgaggacatggctacatatttctgtgcaagatttagctatggtaactcacgttacgctgactactggggccaaggcaccactctcacagtctcctctgatca

SEQ ID NO: 412 - protein, 268 aa, Artificial sequence
  Description of Artificial Sequence: Synthetic amino acid sequence
MDFQVQIFSFLLISASVIMSRGQIVLSQSPAILSASPGEKVTLTCRASSSVSFMNWYQQKPGSSPKPWIYATSNLASEFPGRFSGEWSGTSYSLAISRVEAEDAATYYCQQWNSNPLTFGAGTKLELKELSGGGGSGGGGSGGGGSLQIQLVQSGPESKKPGETVKISCKASGYTFTNYGMNWVKQAPGKGLKWMGWINTYTGQPTYADDFKGRFAFSLETSAYTAYLQINNLKNEDMATYFCARFSYGNSRYADYWGQGTTLTVSSD

SEQ ID NO: 413 - DNA, 1542 bp, Artificial sequence
  Description of Artificial Sequence: Synthetic nucleotide sequence
aagcttgttgttatggattttcaagtgcagattttcagcttcctgctaatcagtgcttcagtcataatgtccagaggacaaattgttctctcccagtctccagcaatcctgtctgcatctccaggggagaaggtcacattgacttgcagggccagctcaagtgtaagtttcatgaactggtaccagcagaagccaggatcctcccccaaaccctggatttatgccacatccaatttggcttctgagttccctggtcgcttcagtggcgagtggtctgggacctcttactctctcgcaatcagcagagtggaggctgaagatgctgccacttattactgccagcagtggaatagtaacccactcacgttcggtgctgggaccaagctggagctgaaagagctctctggtggcggtggctcgggcggtggtgggtcgggtggcggcggatctctgcagatccagttggtgcagtctggacctgagtcgaagaagcctggagagacagtcaagatctcctgcaaggcttctgggtataccttcacaaactatggaatgaactgggtgaagcaggctccaggaaagggtttaaagtggatgggctggataaacacctacactggacagccaacatatgctgatgacttcaagggacggtttgccttctctttggaaacctctgcctacactgcctatttgcagatcaacaacctcaaaaatgaggacatggctacatatttctgtgcaagatttagctatggtaactcacgttacgctgactactggggccaaggcaccactctcacagtctcctctgatcagccagttccctcaactccacctaccccatctccctcaactccacctaccccatctccctcatgcgcacctgaactcctggggggaccgtcagtcttcctcttccccccaaaacccaaggacaccctcatgatctcccggacccctgaggtcacatgcgtggtggtggacgtgagccacgaagaccctgaggtcaagttcaactggtacgtggacggcgtggaggtgcataatgccaagacaaagccgcgggaggagcagtacaacagcacgtaccgtgtggtcagcgtcctcaccgtcctgcaccaggactggctgaatggcaaggagtacaagtgcaaggtctccaacaaagccctcccagcccccatcgagaaaacaatctccaaagccaaagggcagccccgagaaccacaggtgtacaccctgcccccatcccgggatgagctgaccaagaaccaggtcagcctgacctgcctggtcaaaggcttctatcccagcgacatcgccgtggagtgggagagcaatgggcagccggagaacaactacaagaccacgcctcccgtgctggactccgacggctccttcttcctctacagcaagctcaccgtggacaagagcaggtggcagcaggggaacgtcttctcatgctccgtgatgcatgaggctctgcacaaccactacacgcagaagagcctctccctgtctccgggtaaatgatctaga

SEQ ID NO: 414 - protein, 507 aa, Artificial sequence
  Description of Artificial Sequence: Synthetic amino acid sequence
MDFQVQIFSFLLISASVIMSRGQIVLSQSPAILSASPGEKVTLTCRASSSVSFMNWYQQKPGSSPKPWIYATSNLASEFPGRFSGEWSGTSYSLAISRVEAEDAATYYCQQWNSNPLTFGAGTKLELKELSGGGGSGGGGSGGGGSLQIQLVQSGPESKKPGETVKISCKASGYTFTNYGMNWVKQAPGKGLKWMGWINTYTGQPTYADDFKGRFAFSLETSAYTAYLQINNLKNEDMATYFCARFSYGNSRYADYWGQGTTLTVSSDQPVPSTPPTPSPSTPPTPSPSCAPELLGGPSVFLFPPKPKDTLMISRTPEVTCVVVDVSHEDPEVKFNWYVDGVEVHNAKTKPREEQYNSTYRVVSVLTVLHQDWLNGKEYKCKVSNKALPAPIEKTISKAKGQPREPQVYTLPPSRDELTKNQVSLTCLVKGFYPSDIAVEWESNGQPENNYKTTPPVLDSDGSFFLYSKLTVDKSRWQQGNVFSCSVMHEALHNHYTQKSLSLSPGK

SEQ ID NO: 415 - DNA, 1524 bp, Artificial sequence
  Description of Artificial Sequence: Synthetic nucleotide sequence
aagcttgttgttatggattttcaagtgcagattttcagcttcctgctaatcagtgcttcagtcataatgtccagaggacaaattgttctctcccagtctccagcaatcctgtctgcatctccaggggagaaggtcacattgacttgcagggccagctcaagtgtaagtttcatgaactggtaccagcagaagccaggatcctcccccaaaccctggatttatgccacatccaatttggcttctgagttccctggtcgcttcagtggcgagtggtctgggacctcttactctctcgcaatcagcagagtggaggctgaagatgctgccacttattactgccagcagtggaatagtaacccactcacgttcggtgctgggaccaagctggagctgaaagagctctctggtggcggtggctcgggcggtggtgggtcgggtggcggcggatctctgcagatccagttggtgcagtctggacctgagtcgaagaagcctggagagacagtcaagatctcctgcaaggcttctgggtataccttcacaaactatggaatgaactgggtgaagcaggctccaggaaagggtttaaagtggatgggctggataaacacctacactggacagccaacatatgctgatgacttcaagggacggtttgccttctctttggaaacctctgcctacactgcctatttgcagatcaacaacctcaaaaatgaggacatggctacatatttctgtgcaagatttagctatggtaactcacgttacgctgactactggggccaaggcaccactctcacagtctcctctgatcaggagcccaaatcttctgacaaaactcacacatccccaccgtcctcagcacctgaactcctggggggaccgtcagtcttcctcttccccccaaaacccaaggacaccctcatgatctcccggacccctgaggtcacatgcgtggtggtggacgtgagccacgaagaccctgaggtcaagttcaactggtacgtggacggcgtggaggtgcataatgccaagacaaagccgcgggaggagcagtacaacagcacgtaccgtgtggtcagcgtcctcaccgtcctgcaccaggactggctgaatggcaaggagtacaagtgcaaggtctccaacaaagccctcccagcccccatcgagaaaacaatctccaaagccaaagggcagccccgagaaccacaggtgtacaccctgcccccatcccgggatgagctgaccaagaaccaggtcagcctgacctgcctggtcaaaggcttctatcccagcgacatcgccgtggagtgggagagcaatgggcagccggagaacaactacaagaccacgcctcccgtgctggactccgacggctccttcttcctctacagcaagctcaccgtggacaagagcaggtggcagcaggggaacgtcttctcatgctccgtgatgcatgaggctctgcacaaccactacacgcagaagagcctctccctgtctccgggtaaatgatctaga

SEQ ID NO: 416 - protein, 501 aa, Artificial sequence
  Description of Artificial Sequence: Synthetic amino acid sequence
MDFQVQIFSFLLISASVIMSRGQIVLSQSPAILSASPGEKVTLTCRASSSVSFMNWYQQKPGSSPKPWIYATSNLASEFPGRFSGEWSGTSYSLAISRVEAEDAATYYCQQWNSNPLTFGAGTKLELKELSGGGGSGGGGSGGGGSLQIQLVQSGPESKKPGETVKISCKASGYTFTNYGMNWVKQAPGKGLKWMGWINTYTGQPTYADDFKGRFAFSLETSAYTAYLQINNLKNEDMATYFCARFSYGNSRYADYWGQGTTLTVSSDQEPKSSDKTHTSPPSSAPELLGGPSVFLFPPKPKDTLMISRTPEVTCVVVDVSHEDPEVKFNWYVDGVEVHNAKTKPREEQYNSTYRVVSVLTVLHQDWLNGKEYKCKVSNKALPAPIEKTISKAKGQPREPQVYTLPPSRDELTKNQVSLTCLVKGFYPSDIAVEWESNGQPENNYKTTPPVLDSDGSFFLYSKLTVDKSRWQQGNVFSCSVMHEALHNHYTQKSLSLSPGK

SEQ ID NO: 417 - DNA, 657 bp, Artificial sequence
  Description of Artificial Sequence: Synthetic nucleotide sequence
cctgaactcctggggggatcgtcagtcttcctcttccccccaaaacccaaggacaccctcatgatctcccggacccctgaggtcacatgcgtggtggtggacgtgagccacgaagaccctgaggtcaagttcaactggtacgtggacggcgtggaggtgcataatgccaagacaaagccgcgggaggagcagtacaacagcacgtaccgtgtggtcagcgtcctcaccgtcctgcaccaggactggctgaatggcaaggagtacaagtgcaaggtctccaacaaagccctcccagcccccatcgagaaaacaatctccaaagccaaagggcagccccgagaaccacaggtgtacaccctgcccccatcccgggatgagctgaccaagaaccaggtcagcctgacctgcctggtcaaaggcttctatcccagcgacatcgccgtggagtgggagagcaatgggcagccggagaacaactacaagaccacgcctcccgtgctggactccgacggctccttcttcctctacagcaagctcaccgtggacaagagcaggtggcagcaggggaacgtcttctcatgctccgtgatgcatgaggctctgcacaaccactacacgcagaagagcctctccctgtctccgggtaaatgatctaga

SEQ ID NO: 418 - protein, 216 aa, Artificial sequence
  Description of Artificial Sequence: Synthetic amino acid sequence
PELLGGSSVFLFPPKPKDTLMISRTPEVTCVVVDVSHEDPEVKFNWYVDGVEVHNAKTKPREEQYNSTYRVVSVLTVLHQDWLNGKEYKCKVSNKALPAPIEKTISKAKGQPREPQVYTLPPSRDELTKNQVSLTCLVKGFYPSDIAVEWESNGQPENNYKTTPPVLDSDGSFFLYSKLTVDKSRWQQGNVFSCSVMHEALHNHYTQKSLSLSPGK

SEQ ID NO: 419 - DNA, 712 bp, Artificial sequence
  Description of Artificial Sequence: Synthetic nucleotide sequence
tgatcaggagcccaaatcttctgacaaaactcacacatccccaccgtcctcagcacctgaactcctggggggatcgtcagtcttcctcttccccccaaaacccaaggacaccctcatgatctcccggacccctgaggtcacatgcgtggtggtggacgtgagccacgaagaccctgaggtcaagttcaactggtacgtggacggcgtggaggtgcataatgccaagacaaagccgcgggaggagcagtacaacagcacgtaccgtgtggtcagcgtcctcaccgtcctgcaccaggactggctgaatggcaaggagtacaagtgcaaggtctccaacaaagccctcccagcccccatcgagaaaacaatctccaaagccaaagggcagccccgagaaccacaggtgtacaccctgcccccatcccgggatgagctgaccaagaaccaggtcagcctgacctgcctggtcaaaggcttctatcccagcgacatcgccgtggagtgggagagcaatgggcagccggagaacaactacaagaccacgcctcccgtgctggactccgacggctccttcttcctctacagcaagctcaccgtggacaagagcaggtggcagcaggggaacgtcttctcatgctccgtgatgcatgaggctctgcacaaccactacacgcagaagagcctctccctgtctccgggtaaatgatctaga

SEQ ID NO: 420 - protein, 234 aa, Artificial sequence
  Description of Artificial Sequence: Synthetic amino acid sequence
DQEPKSSDKTHTSPPSSAPELLGGSSVFLFPPKPKDTLMISRTPEVTCVVVDVSHEDPEVKFNWYVDGVEVHNAKTKPREEQYNSTYRVVSVLTVLHQDWLNGKEYKCKVSNKALPAPIEKTISKAKGQPREPQVYTLPPSRDELTKNQVSLTCLVKGFYPSDIAVEWESNGQPENNYKTTPPVLDSDGSFFLYSKLTVDKSRWQQGNVFSCSVMHEALHNHYTQKSLSLSPGK

SEQ ID NO: 421 - DNA, 706 bp, Artificial sequence
  Description of Artificial Sequence: Synthetic nucleotide sequence
ggagcccaaatcttctgacaaaactcacacatccccaccgtcctcagcacctgaactcctggggggatcgtcagtcttcctcttccccccaaaacccaaggacaccctcatgatctcccggacccctgaggtcacatgcgtggtggtggacgtgagccacgaagaccctgaggtcaagttcaactggtacgtggacggcgtggaggtgcataatgccaagacaaagccgcgggaggagcagtacaacagcacgtaccgtgtggtcagcgtcctcaccgtcctgcaccaggactggctgaatggcaaggagtacaagtgcaaggtctccaacaaagccctcccagcccccatcgagaaaacaatctccaaagccaaagggcagccccgagaaccacaggtgtacaccctgcccccatcccgggatgagctgaccaagaaccaggtcagcctgacctgcctggtcaaaggcttctatcccagcgacatcgccgtggagtgggagagcaatgggcagccggagaacaactacaagaccacgcctcccgtgctggactccgacggctccttcttcctctacagcaagctcaccgtggacaagagcaggtggcagcaggggaacgtcttctcatgctccgtgatgcatgaggctctgcacaaccactacacgcagaagagcctctccctgtctccgggtaaatgatctaga

SEQ ID NO: 422 - protein, 429 aa, Artificial sequence
  Description of Artificial Sequence: Synthetic amino acid sequence
MWQLLLPTALLLLVSAGMRTEDLPKAVVFLEPQWYRVLEKDSVTLKCQGAYSPEDNSTQWFHNESLISSQASSYFIDAATVDDSGEYRCQTNLSTLSDPVQLEVHIGWLLLQAPRWVFKEEDPIHLRCHSWKNTALHKVTYLQNGKGRKYFHHNSDFYIPKATLKDSGSYFCRGLVGSKNVSSETVNITITQGLADQEPKSSDKTHTSPPSSAPELLGGSSVFLFPPKPKDTLMISRTPEVTCVVVDVSHEDPEVKFNWYVDGVEVHNAKTKPREEQYNSTYRVVSVLTVLHQDWLNGKEYKCKVSNKALPAPIEKTISKAKGQPREPQVYTLPPSRDELTKNQVSLTCLVKGFYPSDIAVEWESNGQPENNYKTTPPVLDSDGSFFLYSKLTVDKSRWQQGNVFSCSVMHEALHNHYTQKSLSLSPGK

SEQ ID NO: 423 - DNA, 1349 bp, Artificial sequence
  Description of Artificial Sequence: Synthetic nucleotide sequence
aagcttgccgccatgcctgcttgtcgcctaggcccgctagccgccgccctcctcctcagcctgctgctgttcggcttcaccctagtctcaggcaccggtgcaatgcggactgaagatctcccaaaggctgtggtgttcctggagcctcaatggtacagggtgctcgagaaggacagtgtgactctgaagtgccagggagcctactcccctgaggacaattccacacagtggtttcacaatgagagcctcatctcaagccaggcctcgagctacttcattgacgctgccacagtcgacgacagtggagagtacaggtgccagacaaacctctccaccctcagtgacccggtgcagctagaagtccatatcggctggctgttgctccaggcccctcggtgggtgttcaaggaggaagaccctattcacctgaggtgtcacagctggaagaacactgctctgcataaggtcacatatttacagaatggcaaaggcaggaagtattttcatcataattctgacttctacattccaaaagccacactcaaagacagcggctcctacttctgcagggggcttgttgggagtaaaaatgtgtcttcagagactgtgaacatcaccatcactcaaggtttggctgatcaggagcccaaatcttctgacaaaactcacacatccccaccgtcctcagcacctgaactcctggggggatcgtcagtcttcctcttccccccaaaacccaaggacaccctcatgatctcccggacccctgaggtcacatgcgtggtggtggacgtgagccacgaagaccctgaggtcaagttcaactggtacgtggacggcgtggaggtgcataatgccaagacaaagccgcgggaggagcagtacaacagcacgtaccgtgtggtcagcgtcctcaccgtcctgcaccaggactggctgaatggcaaggagtacaagtgcaaggtctccaacaaagccctcccagcccccatcgagaaaacaatctccaaagccaaagggcagccccgagaaccacaggtgtacaccctgcccccatcccgggatgagctgaccaagaaccaggtcagcctgacctgcctggtcaaaggcttctatcccagcgacatcgccgtggagtgggagagcaatgggcagccggagaacaactacaagaccacgcctcccgtgctggactccgacggctccttcttcctctacagcaagctcaccgtggacaagagcaggtggcagcaggggaacgtcttctcatgctccgtgatgcatgaggctctgcacaaccactacacgcagaagagcctctccctgtctccgggtaaatgatctagaaa

SEQ ID NO: 424 - protein, 442 aa, Artificial sequence
  Description of Artificial Sequence: Synthetic amino acid sequence
MPACRLGPLAAALLLSLLLFGFTLVSGTGAMRTEDLPKAVVFLEPQWYRVLEKDSVTLKCQGAYSPEDNSTQWFHNESLISSQASSYFIDAATVDDSGEYRCQTNLSTLSDPVQLEVHIGWLLLQAPRWVFKEEDPIHLRCHSWKNTALHKVTYLQNGKGRKYFHHNSDFYIPKATLKDSGSYFCRGLVGSKNVSSETVNITITQGLADQEPKSSDKTHTSPPSSAPELLGGSSVFLFPPKPKDTLMISRTPEVTCVVVDVSHEDPEVKFNWYVDGVEVHNAKTKPREEQYNSTYRVVSVLTVLHQDWLNGKEYKCKVSNKALPAPIEKTISKAKGQPREPQVYTLPPSRDELTKNQVSLTCLVKGFYPSDIAVEWESNGQPENNYKTTPPVLDSDGSFFLYSKLTVDKSRWQQGNVFSCSVMHEALHNHYTQKSLSLSPGK

SEQ ID NO: 425 - DNA, 1316 bp, Artificial sequence
  Description of Artificial Sequence: Synthetic nucleotide sequence
gttgttaagcttgccgccatgtggcagctgctcctcccaactgctctgctacttctagtttcagctggcatgcggactgaagatctcccaaaggctgtggtgttcctggagcctcaatggtacagggtgctcgagaaggacagtgtgactctgaagtgccagggagcctactcccctgaggacaattccacacagtggtttcacaatgagagcctcatctcaagccaggcctcgagctacttcattgacgctgccacagtcgacgacagtggagagtacaggtgccagacaaacctctccaccctcagtgacccggtgcagctagaagtccatatcggctggctgttgctccaggcccctcggtgggtgttcaaggaggaagaccctattcacctgaggtgtcacagctggaagaacactgctctgcataaggtcacatatttacagaatggcaaaggcaggaagtattttcatcataattctgacttctacattccaaaagccacactcaaagacagcggctcctacttctgcagggggctttttgggagtaaaaatgtgtcttcagagactgtgaacatcaccatcactcaaggtttggctgatcaggagcccaaatcttctgacaaaactcacacatccccaccgtcctcagcacctgaactcctggggggatcgtcagtcttcctcttccccccaaaacccaaggacaccctcatgatctcccggacccctgaggtcacatgcgtggtggtggacgtgagccacgaagaccctgaggtcaagttcaactggtacgtggacggcgtggaggtgcataatgccaagacaaagccgcgggaggagcagtacaacagcacgtaccgtgtggtcagcgtcctcaccgtcctgcaccaggactggctgaatggcaaggagtacaagtgcaaggtctccaacaaagccctcccagcccccatcgagaaaacaatctccaaagccaaagggcagccccgagaaccacaggtgtacaccctgcccccatcccgggatgagctgaccaagaaccaggtcagcctgacctgcctggtcaaaggcttctatcccagcgacatcgccgtggagtgggagagcaatgggcagccggagaacaactacaagaccacgcctcccgtgctggactccgacggctccttcttcctctacagcaagctcaccgtggacaagagcaggtggcagcaggggaacgtcttctcatgctccgtgatgcatgaggctctgcacaaccactacacgcagaagagcctctccctgtctccgggtaaatgatctagaaa

SEQ ID NO: 426 - protein, 429 aa, Artificial sequence
  Description of Artificial Sequence: Synthetic amino acid sequence
MWQLLLPTALLLLVSAGMRTEDLPKAVVFLEPQWYRVLEKDSVTLKCQGAYSPEDNSTQWFHNESLISSQASSYFIDAATVDDSGEYRCQTNLSTLSDPVQLEVHIGWLLLQAPRWVFKEEDPIHLRCHSWKNTALHKVTYLQNGKGRKYFHHNSDFYIPKATLKDSGSYFCRGLFGSKNVSSETVNITITQGLADQEPKSSDKTHTSPPSSAPELLGGSSVFLFPPKPKDTLMISRTPEVTCVVVDVSHEDPEVKFNWYVDGVEVHNAKTKPREEQYNSTYRVVSVLTVLHQDWLNGKEYKCKVSNKALPAPIEKTISKAKGQPREPQVYTLPPSRDELTKNQVSLTCLVKGFYPSDIAVEWESNGQPENNYKTTPPVLDSDGSFFLYSKLTVDKSRWQQGNVFSCSVMHEALHNHYTQKSLSLSPGK

SEQ ID NO: 427 - DNA, 1349 bp, Artificial sequence
  Description of Artificial Sequence: Synthetic nucleotide sequence
aagcttgccgccatgcctgcttgtcgcctaggcccgctagccgccgccctcctcctcagcctgctgctgttcggcttcaccctagtctcaggcaccggtgcaatgcggactgaagatctcccaaaggctgtggtgttcctggagcctcaatggtacagggtgctcgagaaggacagtgtgactctgaagtgccagggagcctactcccctgaggacaattccacacagtggtttcacaatgagagcctcatctcaagccaggcctcgagctacttcattgacgctgccacagtcgacgacagtggagagtacaggtgccagacaaacctctccaccctcagtgacccggtgcagctagaagtccatatcggctggctgttgctccaggcccctcggtgggtgttcaaggaggaagaccctattcacctgaggtgtcacagctggaagaacactgctctgcataaggtcacatatttacagaatggcaaaggcaggaagtattttcatcataattctgacttctacattccaaaagccacactcaaagacagcggctcctacttctgcagggggctttttgggagtaaaaatgtgtcttcagagactgtgaacatcaccatcactcaaggtttggctgatcaggagcccaaatcttctgacaaaactcacacatccccaccgtcctcagcacctgaactcctggggggatcgtcagtcttcctcttccccccaaaacccaaggacaccctcatgatctcccggacccctgaggtcacatgcgtggtggtggacgtgagccacgaagaccctgaggtcaagttcaactggtacgtggacggcgtggaggtgcataatgccaagacaaagccgcgggaggagcagtacaacagcacgtaccgtgtggtcagcgtcctcaccgtcctgcaccaggactggctgaatggcaaggagtacaagtgcaaggtctccaacaaagccctcccagcccccatcgagaaaacaatctccaaagccaaagggcagccccgagaaccacaggtgtacaccctgcccccatcccgggatgagctgaccaagaaccaggtcagcctgacctgcctggtcaaaggcttctatcccagcgacatcgccgtggagtgggagagcaatgggcagccggagaacaactacaagaccacgcctcccgtgctggactccgacggctccttcttcctctacagcaagctcaccgtggacaagagcaggtggcagcaggggaacgtcttctcatgctccgtgatgcatgaggctctgcacaaccactacacgcagaagagcctctccctgtctccgggtaaatgatctagaaa

SEQ ID NO: 428 - protein, 442 aa, Artificial sequence
  Description of Artificial Sequence: Synthetic amino acid sequence
MPACRLGPLAAALLLSLLLFGFTLVSGTGAMRTEDLPKAVVFLEPQWYRVLEKDSVTLKCQGAYSPEDNSTQWFHNESLISSQASSYFIDAATVDDSGEYRCQTNLSTLSDPVQLEVHIGWLLLQAPRWVFKEEDPIHLRCHSWKNTALHKVTYLQNGKGRKYFHHNSDFYIPKATLKDSGSYFCRGLFGSKNVSSETVNITITQGLADQEPKSSDKTHTSPPSSAPELLGGSSVFLFPPKPKDTLMISRTPEVTCVVVDVSHEDPEVKFNWYVDGVEVHNAKTKPREEQYNSTYRVVSVLTVLHQDWLNGKEYKCKVSNKALPAPIEKTISKAKGQPREPQVYTLPPSRDELTKNQVSLTCLVKGFYPSDIAVEWESNGQPENNYKTTPPVLDSDGSFFLYSKLTVDKSRWQQGNVFSCSVMHEALHNHYTQKSLSLSPGK

SEQ ID NO: 429 - DNA, 605 bp, Artificial sequence
  Description of Artificial Sequence: Synthetic nucleotide sequence
aagcttgccgccatgtggcagctgctcctcccaactgctctgctacttctagtttcagctggcatgcggactgaagatctcccaaaggctgtggtgttcctggagcctcaatggtacagggtgctcgagaaggacagtgtgactctgaagtgccagggagcctactcccctgaggacaattccacacagtggtttcacaatgagagcctcatctcaagccaggcctcgagctacttcattgacgctgccacagtcgacgacagtggagagtacaggtgccagacaaacctctccaccctcagtgacccggtgcagctagaagtccatatcggctggctgttgctccaggcccctcggtgggtgttcaaggaggaagaccctattcacctgaggtgtcacagctggaagaacactgctctgcataaggtcacatatttacagaatggcaaaggcaggaagtattttcatcataattctgacttctacattccaaaagccacactcaaagacagcggctcctacttctgcagggggcttgttgggagtaaaaatgtgtcttcagagactgtgaacatcaccatcactcaaggtttggctgatcaaaa

SEQ ID NO: 430 - protein, 197 aa, Artificial sequence
  Description of Artificial Sequence: Synthetic amino acid sequence
MWQLLLPTALLLLVSAGMRTEDLPKAVVFLEPQWYRVLEKDSVTLKCQGAYSPEDNSTQWFHNESLISSQASSYFIDAATVDDSGEYRCQTNLSTLSDPVQLEVHIGWLLLQAPRWVFKEEDPIHLRCHSWKNTALHKVTYLQNGKGRKYFHHNSDFYIPKATLKDSGSYFCRGLVGSKNVSSETVNITITQGLADQ

SEQ ID NO: 431 - DNA, 643 bp, Artificial sequence
  Description of Artificial Sequence: Synthetic nucleotide sequence
aagcttgccgccatgcctgcttgtcgcctaggcccgctagccgccgccctcctcctcagcctgctgctgttcggcttcaccctagtctcaggcaccggtgcaatgcggactgaagatctcccaaaggctgtggtgttcctggagcctcaatggtacagggtgctcgagaaggacagtgtgactctgaagtgccagggagcctactcccctgaggacaattccacacagtggtttcacaatgagagcctcatctcaagccaggcctcgagctacttcattgacgctgccacagtcgacgacagtggagagtacaggtgccagacaaacctctccaccctcagtgacccggtgcagctagaagtccatatcggctggctgttgctccaggcccctcggtgggtgttcaaggaggaagaccctattcacctgaggtgtcacagctggaagaacactgctctgcataaggtcacatatttacagaatggcaaaggcaggaagtattttcatcataattctgacttctacattccaaaagccacactcaaagacagcggctcctacttctgcagggggcttgttgggagtaaaaatgtgtcttcagagactgtgaacatcaccatcactcaaggtttggctgatcaaa

SEQ ID NO: 432 - protein, 210 aa, Artificial sequence
  Description of Artificial Sequence: Synthetic amino acid sequence
MPACRLGPLAAALLLSLLLFGFTLVSGTGAMRTEDLPKAVVFLEPQWYRVLEKDSVTLKCQGAYSPEDNSTQWFHNESLISSQASSYFIDAATVDDSGEYRCQTNLSTLSDPVQLEVHIGWLLLQAPRWVFKEEDPIHLRCHSWKNTALHKVTYLQNGKGRKYFHHNSDFYIPKATLKDSGSYFCRGLVGSKNVSSETVNITITQGLADQ

SEQ ID NO: 433 - DNA, 610 bp, Artificial sequence
  Description of Artificial Sequence: Synthetic nucleotide sequence
gttgttaagcttgccgccatgtggcagctgctcctcccaactgctctgctacttctagtttcagctggcatgcggactgaagatctcccaaaggctgtggtgttcctggagcctcaatggtacagggtgctcgagaaggacagtgtgactctgaagtgccagggagcctactcccctgaggacaattccacacagtggtttcacaatgagagcctcatctcaagccaggcctcgagctacttcattgacgctgccacagtcgacgacagtggagagtacaggtgccagacaaacctctccaccctcagtgacccggtgcagctagaagtccatatcggctggctgttgctccaggcccctcggtgggtgttcaaggaggaagaccctattcacctgaggtgtcacagctggaagaacactgctctgcataaggtcacatatttacagaatggcaaaggcaggaagtattttcatcataattctgacttctacattccaaaagccacactcaaagacagcggctcctacttctgcagggggctttttgggagtaaaaatgtgtcttcagagactgtgaacatcaccatcactcaaggtttggctgatcaaa

SEQ ID NO: 434 - protein, 197 aa, Artificial sequence
  Description of Artificial Sequence: Synthetic amino acid sequence
MWQLLLPTALLLLVSAGMRTEDLPKAVVFLEPQWYRVLEKDSVTLKCQGAYSPEDNSTQWFHNESLISSQASSYFIDAATVDDSGEYRCQTNLSTLSDPVQLEVHIGWLLLQAPRWVFKEEDPIHLRCHSWKNTALHKVTYLQNGKGRKYFHHNSDFYIPKATLKDSGSYFCRGLFGSKNVSSETVNITITQGLADQ

SEQ ID NO: 435 - DNA, 643 bp, Artificial sequence
  Description of Artificial Sequence: Synthetic nucleotide sequence
aagcttgccgccatgcctgcttgtcgcctaggcccgctagccgccgccctcctcctcagcctgctgctgttcggcttcaccctagtctcaggcaccggtgcaatgcggactgaagatctcccaaaggctgtggtgttcctggagcctcaatggtacagggtgctcgagaaggacagtgtgactctgaagtgccagggagcctactcccctgaggacaattccacacagtggtttcacaatgagagcctcatctcaagccaggcctcgagctacttcattgacgctgccacagtcgacgacagtggagagtacaggtgccagacaaacctctccaccctcagtgacccggtgcagctagaagtccatatcggctggctgttgctccaggcccctcggtgggtgttcaaggaggaagaccctattcacctgaggtgtcacagctggaagaacactgctctgcataaggtcacatatttacagaatggcaaaggcaggaagtattttcatcataattctgacttctacattccaaaagccacactcaaagacagcggctcctacttctgcagggggctttttgggagtaaaaatgtgtcttcagagactgtgaacatcaccatcactcaaggtttggctgatcaaa

SEQ ID NO: 436 - protein, 210 aa, Artificial sequence
  Description of Artificial Sequence: Synthetic amino acid sequence
MPACRLGPLAAALLLSLLLFGFTLVSGTGAMRTEDLPKAVVFLEPQWYRVLEKDSVTLKCQGAYSPEDNSTQWFHNESLISSQASSYFIDAATVDDSGEYRCQTNLSTLSDPVQLEVHIGWLLLQAPRWVFKEEDPIHLRCHSWKNTALHKVTYLQNGKGRKYFHHNSDFYIPKATLKDSGSYFCRGLFGSKNVSSETVNITITQGLADQ

SEQ ID NO: 437 - DNA, 1683 bp, Artificial sequence; identical to SEQ ID NO: 51
  Description of Artificial Sequence: Synthetic nucleotide sequence

SEQ ID NO: 438 - protein, 556 aa, Artificial sequence; identical to SEQ ID NO: 52
  Description of Artificial Sequence: Synthetic amino acid sequence

SEQ ID NO: 439 - DNA, 1665 bp, Artificial sequence; identical to SEQ ID NO: 53
  Description of Artificial Sequence: Synthetic nucleotide sequence

SEQ ID NO: 440 - protein, 550 aa, Artificial sequence; identical to SEQ ID NO: 54
  Description of Artificial Sequence: Synthetic amino acid sequence

SEQ ID NO: 441 - DNA, 1674 bp, Artificial sequence
  Description of Artificial Sequence: Synthetic nucleotide sequence
aagcttgccgccatggattttcaagtgcagattttcagcttcctgctaatcagtgcttcagtcataattgccagaggacaaattgttctctcccagtctccagcaatcctgtctgcatctccaggggagaaggtcacaatgacttgcagggccagctcaagtgtaagttacatgcactggtaccagcagaagccaggatcctcccccaaaccctggatttatgccccatccaacctggcttctggagtccctgctcgcttcagtggcagtgggtctgggacctcttactctctcacaatcagcagagtggaggctgaagatgctgccacttattactgccagcagtggagttttaacccacccacgttcggtgctgggaccaagctggagctgaaagatggcggtggctcgggcggtggtggatctggaggaggtgggagctctcaggcttatctacagcagtctggggctgagtcggtgaggcctggggcctcagtgaagatgtcctgcaaggcttctggctacacatttaccagttacaatatgcactgggtaaagcagacacctagacagggcctggaatggattggagctatttatccaggaaatggtgatacttcctacaatcagaagttcaagggcaaggccacactgactgtagacaaatcctccagcacagcctacatgcagctcagcagcctgacatctgaagactctgcggtctatttctgtgcaagagtggtgtactatagtaactcttactggtacttcgatgtctggggcacagggaccacggtcaccgtctcttctgatctggagcccaaatcttctgacaaaactcacacatccccaccgtccccagcacctgaactcctggggggatcgtcagtcttcctcttccccccaaaacccaaggacaccctcatgatctcccggacccctgaggtcacatgcgtggtggtggacgtgagccacgaagaccctgaggtcaagttcaactggtacgtggacggcgtggaggtgcataatgccaagacaaagccgcgggaggagcagtacaacagcacgtaccgtgtggtcagcgtcctcaccgtcctgcaccaggactggctgaatggcaaggagtacaagtgcaaggtctccaacaaagccctcccagcccccatcgagaaaaccatctccaaagccaaagggcagccccgagaaccacaggtgtacaccctgcccccatcccgggatgagctgaccaagaaccaggtcagcctgacctgcctggtcaaaggcttctatcccagcgacatcgccgtggagtgggagagcaatgggcagccggagaacaactacaagaccacgcctcccgtgctggactccgacggctccttcttcctctacagcaagctcaccgtggacaagagcaggtggcagcaggggaacgtcttctcatgctccgtgatgcatgaggctctgcacaaccactacacgcagaagagcctctccctgtctccgggtaaagcggatccttcgaacctgctcccatcctgggccattaccttaatctcagtaaatggaatttttgtgatatgctgcctgacctactgctttgccccaagatgcagagagagaaggaggaatgagagattgagaagggaaagtgtacgccctgtataaatcgat

SEQ ID NO: 442 - protein, 551 aa, Artificial sequence
  Description of Artificial Sequence: Synthetic amino acid sequence
MDFQVQIFSFLLISASVIIARGQIVLSQSPAILSASPGEKVTMTCRASSSVSYMHWYQQKPGSSPKPWIYAPSNLASGVPARFSGSGSGTSYSLTISRVEAEDAATYYCQQWSFNPPTFGAGTKLELKDGGGSGGGGSGGGGSSQAYLQQSGAESVRPGASVKMSCKASGYTFTSYNMHWVKQTPRQGLEWIGAIYPGNGDTSYNQKFKGKATLTVDKSSSTAYMQLSSLTSEDSAVYFCARVVYYSNSYWYFDVWGTGTTVTVSSDLEPKSSDKTHTSPPSPAPELLGGSSVFLFPPKPKDTLMISRTPEVTCVVVDVSHEDPEVKFNWYVDGVEVHNAKTKPREEQYNSTYRVVSVLTVLHQDWLNGKEYKCKVSNKALPAPIEKTISKAKGQPREPQVYTLPPSRDELTKNQVSLTCLVKGFYPSDIAVEWESNGQPENNYKTTPPVLDSDGSFFLYSKLTVDKSRWQQGNVFSCSVMHEALHNHYTQKSLSLSPGKADPSNLLPSWAITLISVNGIFVICCLTYCFAPRCRERRRNERLRRESVRPV

SEQ ID NO: 443 - DNA, 1687 bp, Artificial sequence
  Description of Artificial Sequence: Synthetic nucleotide sequence
aagcttatggattttcaagtgcagattttcagcttcctgctaatcagtgcttcagtcataatgtccagaggagtcgacatccagatgacacagactacatcctccctgtctgcctctctgggagacagagtcaccatcagttgcagggcaagtcaggacattcgcaattatttaaactggtatcagcagaaaccagatggaactgttaaactcctgatctactacacatcaagattacactcaggagtcccatcaaggttcagtggcagtgggtctggaacagattattctctcaccattgccaacctgcaaccagaagatattgccacttacttttgccaacagggtaatacgcttccgtggacgttcggtggaggcaccaaactggtaaccaaacgggagctcggtggcggtggctcgggcggtggtgggtcgggtggcggcggatctatcgatgaggtccagctgcaacagtctggacctgaactggtgaagcctggagcttcaatgtcctgcaaggcctctggttactcattcactggctacatcgtgaactggctgaagcagagccatggaaagaaccttgagtggattggacttattaatccatacaaaggtcttactacctacaaccagaaattcaagggcaaggccacattaactgtagacaagtcatccagcacagcctacatggagctcctcagtctgacatctgaagactctgcagtctattactgtgcaagatctgggtactatggtgactcggactggtacttcgatgtctggggcgcagggaccacggtcaccgtctcctctgatctggagcccaaatcttctgacaaaactcacacaagcccaccgagcccagcacctgaactcctggggggatcgtcagtcttcctcttccccccaaaacccaaggacaccctcatgatctcccggacccctgaggtcacatgcgtggtggtggacgtgagccacgaagaccctgaggtcaagttcaactggtacgtggacggcgtggaggtgcataatgccaagacaaagccgcgggaggagcagtacaacagcacgtaccgtgtggtcagcgtcctcaccgtcctgcaccaggactggctgaatggcaaggagtacaagtgcaaggtctccaacaaagccctcccagcccccatcgagaaaaccatctccaaagccaaagggcagccccgagaaccacaggtgtacaccctgcccccatcccgggatgagctgaccaagaaccaggtcagcctgacctgcctggtcaaaggcttctatcccagcgacatcgccgtggagtgggagagcaatgggcagccggagaacaactacaagaccacgcctcccgtgctggactccgacggctccttcttcctctacagcaagctcaccgtggacaagagcaggtggcagcaggggaacgtcttctcatgctccgtgatgcatgaggctctgcacaaccactacacgcagaagagcctctccctgtctccgggtaaagcggatccttcgaacctgctcccatcctgggccattaccttaatctcagtaaatggaatttttgtgatatgctgcctgacctactgctttgccccaagatgcagagagagaaggaggaatgagagattgagaagggaaagtgtacgccctgtataaatcgatactcgag

SEQ ID NO: 444 - protein, 555 aa, Artificial sequence
  Description of Artificial Sequence: Synthetic amino acid sequence
MDFQVQIFSFLLISASVIMSRGVDIQMTQTTSSLSASLGDRVTISCRASQDIRNYLNWYQQKPDGTVKLLIYYTSRLHSGVPSRFSGSGSGTDYSLTIANLQPEDIATYFCQQGNTLPWTFGGGTKLVTKRELGGGGSGGGGSGGGGSIDEVQLQQSGPELVKPGASMSCKASGYSFTGYIVNWLKQSHGKNLEWIGLINPYKGLTTYNQKFKGKATLTVDKSSSTAYMELLSLTSEDSAVYYCARSGYYGDSDWYFDVWGAGTTVTVSSDLEPKSSDKTHTSPPSPAPELLGGSSVFLFPPKPKDTLMISRTPEVTCVVVDVSHEDPEVKFNWYVDGVEVHNAKTKPREEQYNSTYRVVSVLTVLHQDWLNGKEYKCKVSNKALPAPIEKTISKAKGQPREPQVYTLPPSRDELTKNQVSLTCLVKGFYPSDIAVEWESNGQPENNYKTTPPVLDSDGSFFLYSKLTVDKSRWQQGNVFSCSVMHEALHNHYTQKSLSLSPGKADPSNLLPSWAITLISVNGIFVICCLTYCFAPRCRERRRNERLRRESVRPV

SEQ ID NO: 445 - DNA, 1736 bp, Artificial sequence; identical to SEQ ID NO: 181
  Description of Artificial Sequence: Synthetic nucleotide sequence

SEQ ID NO: 446 - protein, 573 aa, Artificial sequence; identical to SEQ ID NO: 182
  Description of Artificial Sequence: Synthetic amino acid sequence

SEQ ID NO: 447 - DNA, 2166 bp, Artificial sequence
  Description of Artificial Sequence: Synthetic nucleotide sequence
aagcttatggattttcaagtgcagattttcagcttcctgctaatcagtgcttcagtcataatgtccagaggagtcgacattgtgctcacccaatctccagcttctttggctgtgtctctaggtcagagagccaccatctcctgcagagccagtgaaagtgttgaatattatgtcacaagtttaatgcagtggtaccaacagaaaccaggacagccacccaaactcctcatctctgctgcatccaacgtagaatctggggtccctgccaggtttagtggcagtgggtctgggacagacttcagcctcaacatccatcctgtggaggaggatgatattgcaatgtatttctgtcagcaaagtaggaaggttccttggacgttcggtggaggcaccaagctggaaatcaaacggggtggcggtggctcgggcggaggtgggtcgggtggcggcggatctcaggtgcagctgaaggagtcaggacctggcctggtggcgccctcacagagcctgtccatcacatgcaccgtctcagggttctcattaaccggctatggtgtaaactgggttcgccagcctccaggaaagggtctggagtggctgggaatgatatggggtgatggaagcacagactataattcagctctcaaatccagactgagcatcaccaaggacaactccaagagccaagttttcttaaaaatgaacagtctgcaaactgatgacacagccagatactactgtgccagagatggttatagtaactttcattactatgttatggactactggggtcaaggaacctcagtcaccgtctcctcagatctggagcccaaatcttctgacaaaactcacacatccccaccgtccccagcacctgaactcctgggtggatcgtcagtcttcctcttccccccaaaacccaaggacaccctcatgatctcccggacccctgaggtcacatgcgtggtggtggacgtgagccacgaagaccctgaggtcaagttcaactggtacgtggacggcgtggaggtgcataatgccaagacaaagccgcgggaggagcagtacaacagcacgtaccgtgtggtcagcgtcctcaccgtcctgcaccaggactggctgaatggcaaggagtacaagtgcaaggtctccaacaaagccctcccagcccccatcgagaaaaccatctccaaagccaaagggcagccccgagaaccacaggtgtacaccctgcccccatcccgggatgagctgaccaagaaccaggtcagcctgacctgcctggtcaaaggcttctatcccagcgacatcgccgtggagtgggagagcaatgggcagccggagaacaactacaagaccacgcctcccgtgctggactccgacggctccttcttcctctacagcaagctcaccgtggacaagagcaggtggcagcaggggaacgtcttctcatgctccgtgatgcatgaggctctgcacaaccactacacgcagaagagcctctccctgtctccgggtaaagcggatccttcgaacatggacccattcctggtgctgctgcactcgctgtccggcagcctgtcgggcaacgatctgatggagctcaagttcttgtgccgcgagcgcgtgagcaaacgaaagctggagcgcgtgcagagtggcctggacctgttcacggtgctgctggagcagaacgacctggagcgcgggcacaccgggctgctgcgcgagttgctggcctcgctgcgccgacacgatctactgcagcgcctggacgacttcgaggcggggacggcgaccgctgcgcccccgggggaggcagatctgcaggtggcatttgacattgtgtgtgacaatgtggggagagactggaaaagactggcccgcgagctgaaggtgtctgaggccaagatggatgggattgaggagaagtacccccgaagtctgagtgagcgggtaagggagagtctgaaagtctggaagaatgctgagaagaagaacgcctcggtggccggactggtcaaggcgctgcggacctgcaggctgaatctggtggctgacctggtggaagaagcccaggaatctgtgagcaagagtgagaatatgtccccagtactaagggattcaactgtgtcttcctcagaaacaccctgactcgagatcgat

SEQ ID NO: 448 - protein, 715 aa, Artificial sequence
  Description of Artificial Sequence: Synthetic amino acid sequence
MDFQVQIFSFLLISASVIMSRGVDIVLTQSPASLAVSLGQRATISCRASESVEYYVTSLMQWYQQKPGQPPKLLISAASNVESGVPARFSGSGSGTDFSLNIHPVEEDDIAMYFCQQSRKVPWTFGGGTKLEIKRGGGGSGGGGSGGGGSQVQLKESGPGLVAPSQSLSITCTVSGFSLTGYGVNWVRQPPGKGLEWLGMIWGDGSTDYNSALKSRLSITKDNSKSQVFLKMNSLQTDDTARYYCARDGYSNFHYYVMDYWGQGTSVTVSSDLEPKSSDKTHTSPPSPAPELLGGSSVFLFPPKPKDTLMISRTPEVTCVVVDVSHEDPEVKFNWYVDGVEVHNAKTKPREEQYNSTYRVVSVLTVLHQDWLNGKEYKCKVSNKALPAPIEKTISKAKGQPREPQVYTLPPSRDELTKNQVSLTCLVKGFYPSDIAVEWESNGQPENNYKTTPPVLDSDGSFFLYSKLTVDKSRWQQGNVFSCSVMHEALHNHYTQKSLSLSPGKADPSNMDPFLVLLHSLSGSLSGNDLMELKFLCRERVSKRKLERVQSGLDLFTVLLEQNDLERGHTGLLRELLASLRRHDLLQRLDDFEAGTATAAPPGEADLQVAFDIVCDNVGRDWKRLARELKVSEAKMDGIEEKYPRSLSERVRESLKVWKNAEKKNASVAGLVKALRTCRLNLVADLVEEAQESVSKSENMSPVLRDSTVSSSETP

SEQ ID NO: 449 - DNA, 2166 bp, Artificial sequence
  Description of Artificial Sequence: Synthetic nucleotide sequence
aagcttatggattttcaagtgcagattttcagcttcctgctaatcagtgcttcagtcataatgtccagaggagtcgacattgtgctcacccaatctccagcttctttggctgtgtctctaggtcagagagccaccatctcctgcagagccagtgaaagtgttgaatattatgtcacaagtttaatgcagtggtaccaacagaaaccaggacagccacccaaactcctcatctctgctgcatccaacgtagaatctggggtccctgccaggtttagtggcagtgggtctgggacagacttcagcctcaacatccatcctgtggaggaggatgatattgcaatgtatttctgtcagcaaagtaggaaggttccttggacgttcggtggaggcaccaagctggaaatcaaacggggtggcggtggctcgggcggaggtgggtcgggtggcggcggatctcaggtgcagctgaaggagtcaggacctggcctggtggcgccctcacagagcctgtccatcacatgcaccgtctcagggttctcattaaccggctatggtgtaaactgggttcgccagcctccaggaaagggtctggagtggctgggaatgatatggggtgatggaagcacagactataattcagctctcaaatccagactgagcatcaccaaggacaactccaagagccaagttttcttaaaaatgaacagtctgcaaactgatgacacagccagatactactgtgccagagatggttatagtaactttcattactatgttatggactactggggtcaaggaacctcagtcaccgtctcctcagatctggagcccaaatcttctgacaaaactcacacatccccaccgtccccagcacctgaactcctgggtggaccgtcagtcttcctcttccccccaaaacccaaggacaccctcatgatctcccggacccctgaggtcacatgcgtggtggtggacgtgagccacgaagaccctgaggtcaagttcaactggtacgtggacggcgtggaggtgcataatgccaagacaaagccgcgggaggagcagtacaacagcacgtaccgtgtggtcagcgtcctcaccgtcctgcaccaggactggctgaatggcaaggagtacaagtgcaaggtctccaacaaagccctcccagcccccatcgagaaaaccatctccaaagccaaagggcagccccgagaaccacaggtgtacaccctgcccccatcccgggatgagctgaccaagaaccaggtcagcctgacctgcctggtcaaaggcttctatcccagcgacatcgccgtggagtgggagagcaatgggcagccggagaacaactacaagaccacgcctcccgtgctggactccgacggctccttcttcctctacagcaagctcaccgtggacaagagcaggtggcagcaggggaacgtcttctcatgctccgtgatgcatgaggctctgcacaaccactacacgcagaagagcctctccctgtctccgggtaaagcggatccttcgaacatggacccattcctggtgctgctgcactcgctgtccggcagcctgtcgggcaacgatctgatggagctcaagttcttgtgccgcgagcgcgtgagcaaacgaaagctggagcgcgtgcagagtggcctggacctgttcacggtgctgctggagcagaacgacctggagcgcgggcacaccgggctgctgcgcgagttgctggcctcgctgcgccgacacgatctactgcagcgcctggacgacttcgaggcggggacggcgaccgctgcgcccccgggggaggcagatctgcaggtggcatttgacattgtgtgtgacaatgtggggagagactggaaaagactggcccgcgagctgaaggtgtctgaggccaagatggatgggattgaggagaagtacccccgaagtctgagtgagcgggtaagggagagtctgaaagtctggaagaatgctgagaagaagaacgcctcggtggccggactggtcaaggcgctgcggacctgcaggctgaatctggtggctgacctggtggaagaagcccaggaatctgtgagcaagagtgagaatatgtccccagtactaagggattcaactgtgtcttcctcagaaacaccctgactcgagatcgat

SEQ ID NO: 450 - protein, 715 aa, Artificial sequence
  Description of Artificial Sequence: Synthetic amino acid sequence
MDFQVQIFSFLLISASVIMSRGVDIVLTQSPASLAVSLGQRATISCRASESVEYYVTSLMQWYQQKPGQPPKLLISAASNVESGVPARFSGSGSGTDFSLNIHPVEEDDIAMYFCQQSRKVPWTFGGGTKLEIKRGGGGSGGGGSGGGGSQVQLKESGPGLVAPSQSLSITCTVSGFSLTGYGVNWVRQPPGKGLEWLGMIWGDGSTDYNSALKSRLSITKDNSKSQVFLKMNSLQTDDTARYYCARDGYSNFHYYVMDYWGQGTSVTVSSDLEPKSSDKTHTSPPSPAPELLGGPSVFLFPPKPKDTLMISRTPEVTCVVVDVSHEDPEVKFNWYVDGVEVHNAKTKPREEQYNSTYRVVSVLTVLHQDWLNGKEYKCKVSNKALPAPIEKTISKAKGQPREPQVYTLPPSRDELTKNQVSLTCLVKGFYPSDIAVEWESNGQPENNYKTTPPVLDSDGSFFLYSKLTVDKSRWQQGNVFSCSVMHEALHNHYTQKSLSLSPGKADPSNMDPFLVLLHSLSGSLSGNDLMELKFLCRERVSKRKLERVQSGLDLFTVLLEQNDLERGHTGLLRELLASLRRHDLLQRLDDFEAGTATAAPPGEADLQVAFDIVCDNVGRDWKRLARELKVSEAKMDGIEEKYPRSLSERVRESLKVWKNAEKKNASVAGLVKALRTCRLNLVADLVEEAQESVSKSENMSPVLRDSTVSSSETP

SEQ ID NO: 451 - DNA, 860 bp, Mus sp.
ggatccttcgaacatggagaacaacaaaacctcagtggattcaaaatccattaataattttgaagtaaagaccatacatgggagcaagtcagtggactctgggatctatctggacagtagttacaaaatggattatcctgaaatgggcatatgcataataattaataataagaacttccataagagcactggaatgtcatctcgctctggtacggatgtggacgcagccaacctcagagagacattcatgggcctgaaataccaagtcaggaataaaaatgatcttactcgtgaagacattttggaattaatggatagtgtttctaaggaagatcatagcaaaaggagcagctttgtgtgtgtgattctaagccatggtgatgaaggggtcatttatgggacaaatgggcctgttgaactgaaaaagttgactagcttcttcagaggcgactactgccggagtctgactggaaagccgaaactcttcatcattcaggcctgccggggtacggagctggactgtggcattgagacagacagtgggactgatgaggagatggcttgccagaagataccggtggaggctgacttcctgtatgcttactctacagcacctggttactattcctggagaaattcaaaggacgggtcgtggttcatccagtccctttgcagcatgctgaagctgtacgcgcacaagctagaatttatgcacattctcactcgcgttaacaggaaggtggcaacggaattcgagtccttctccctggactccactttccacgcaaagaaacagatcccgtgtattgtgtccatgctcacgaaagaactgtacttttatcactagctcgagatcgatg

SEQ ID NO: 452 - protein, 281 aa, Mus sp.
DPSNMENNKTSVDSKSINNFEVKTIHGSKSVDSGIYLDSSYKMDYPEMGICIIINNKNFHKSTGMSSRSGTDVDAANLRETFMGLKYQVRNKNDLTREDILELMDSVSKEDHSKRSSFVCVILSHGDEGVIYGTNGPVELKKLTSFFRGDYCRSLTGKPKLFIIQACRGTELDCGIETDSGTDEEMACQKIPVEADFLYAYSTAPGYYSWRNSKDGSWFIQSLCSMLKLYAHKLEFMHILTRVNRKVATEFESFSLDSTFHAKKQIPCIVSMLTKELYFYH

SEQ ID NO: 453 - DNA, 2383 bp, Artificial sequence
  Description of Artificial Sequence: Synthetic nucleotide sequence
aagcttatggattttcaagtgcagattttcagcttcctgctaatcagtgcttcagtcataatgtccagaggagtcgacattgtgctcacccaatctccagcttctttggctgtgtctctaggtcagagagccaccatctcctgcagagccagtgaaagtgttgaatattatgtcacaagtttaatgcagtggtaccaacagaaaccaggacagccacccaaactcctcatctctgctgcatccaacgtagaatctggggtccctgccaggtttagtggcagtgggtctgggacagacttcagcctcaacatccatcctgtggaggaggatgatattgcaatgtatttctgtcagcaaagtaggaaggttccttggacgttcggtggaggcaccaagctggaaatcaaacggggtggcggtggctcgggcggaggtgggtcgggtggcggcggatctcaggtgcagctgaaggagtcaggacctggcctggtggcgccctcacagagcctgtccatcacatgcaccgtctcagggttctcattaaccggctatggtgtaaactgggttcgccagcctccaggaaagggtctggagtggctgggaatgatatggggtgatggaagcacagactataattcagctctcaaatccagactgagcatcaccaaggacaactccaagagccaagttttcttaaaaatgaacagtctgcaaactgatgacacagccagatactactgtgccagagatggttatagtaactttcattactatgttatggactactggggtcaaggaacctcagtcaccgtctcctcagatctggagcccaaatcttctgacaaaactcacacatccccaccgtccccagcacctgaactcctgggtggaccgtcagtcttcctcttccccccaaaacccaaggacaccctcatgatctcccggacccctgaggtcacatgcgtggtggtggacgtgagccacgaagaccctgaggtcaagttcaactggtacgtggacggcgtggaggtgcataatgccaagacaaagccgcgggaggagcagtacaacagcacgtaccgtgtggtcagcgtcctcaccgtcctgcaccaggactggctgaatggcaaggagtacaagtgcaaggtctccaacaaagccctcccagcccccatcgagaaaaccatctccaaagccaaagggcagccccgagaaccacaggtgtacaccctgcccccatcccgggatgagctgaccaagaaccaggtcagcctgacctgcctggtcaaaggcttctatcccagcgacatcgccgtggagtgggagagcaatgggcagccggagaacaactacaagaccacgcctcccgtgctggactccgacggctccttcttcctctacagcaagctcaccgtggacaagagcaggtggcagcaggggaacgtcttctcatgctccgtgatgcatgaggctctgcacaaccactacacgcagaagagcctctccctgtctccgggtaaagcggatccttcgaacatggagaacaacaaaacctcagtggattcaaaatccattaataattttgaagtaaagaccatacatgggagcaagtcagtggactctgggatctatctggacagtagttacaaaatggattatcctgaaatgggcatatgcataataattaataataagaacttccataagagcactggaatgtcatctcgctctggtacggatgtggacgcagccaacctcagagagacattcatgggcctgaaataccaagtcaggaataaaaatgatcttactcgtgaagacattttggaattaatggatagtgtttctaaggaagatcatagcaaaaggagcagctttgtgtgtgtgattctaagccatggtgatgaaggggtcatttatgggacaaatgggcctgttgaactgaaaaagttgactagcttcttcagaggcgactactgccggagtctgactggaaagccgaaactcttcatcattcaggcctgccggggtacggagctggactgtggcattgagacagacagtgggactgatgaggagatggcttgccagaagataccggtggaggctgacttcctgtatgcttactctacagcacctggttactattcctggagaaattcaaaggacgggtcgtggttcatccagtccctttgcagcatgctgaagctgtacgcgcacaagctagaatttatgcacattctcactcgcgttaacaggaaggtggcaacggaattcgagtccttctccctggactccactttccacgcaaagaaacagatcccgtgtattgtgtccatgctcacgaaagaactgtacttttatcactagctcgagatcgatg

SEQ ID NO: 454 - protein, 787 aa, Artificial sequence
  Description of Artificial Sequence: Synthetic amino acid sequence
MDFQVQIFSFLLISASVIMSRGVDIVLTQSPASLAVSLGQRATISCRASESVEYYVTSLMQWYQQKPGQPPKLLISAASNVESGVPARFSGSGSGTDFSLNIHPVEEDDIAMYFCQQSRKVPWTFGGGTKLEIKRGGGGSGGGGSGGGGSQVQLKESGPGLVAPSQSLSITCTVSGFSLTGYGVNWVRQPPGKGLEWLGMIWGDGSTDYNSALKSRLSITKDNSKSQVFLKMNSLQTDDTARYYCARDGYSNFHYYVMDYWGQGTSVTVSSDLEPKSSDKTHTSPPSPAPELLGGPSVFLFPPKPKDTLMISRTPEVTCVVVDVSHEDPEVKFNWYVDGVEVHNAKTKPREEQYNSTYRVVSVLTVLHQDWLNGKEYKCKVSNKALPAPIEKTISKAKGQPREPQVYTLPPSRDELTKNQVSLTCLVKGFYPSDIAVEWESNGQPENNYKTTPPVLDSDGSFFLYSKLTVDKSRWQQGNVFSCSVMHEALHNHYTQKSLSLSPGKADPSNMENNKTSVDSKSINNFEVKTIHGSKSVDSGIYLDSSYKMDYPEMGICIIINNKNFHKSTGMSSRSGTDVDAANLRETFMGLKYQVRNKNDLTREDILELMDSVSKEDHSKRSSFVCVILSHGDEGVIYGTNGPVELKKLTSFFRGDYCRSLTGKPKLFIIQACRGTELDCGIETDSGTDEEMACQKIPVEADFLYAYSTAPGYYSWRNSKDGSWFIQSLCSMLKLYAHKLEFMHILTRVNRKVATEFESFSLDSTFHAKKQIPCIVSMLTKELYFYH

SEQ ID NO: 455 - DNA, 2390 bp, Artificial sequence
  Description of Artificial Sequence: Synthetic nucleotide sequence
aagcttatggattttcaagtgcagattttcagcttcctgctaatcagtgcttcagtcataatgtccagaggagtcgacattgtgctcacccaatctccagcttctttggctgtgtctctaggtcagagagccaccatctcctgcagagccagtgaaagtgttgaatattatgtcacaagtttaatgcagtggtaccaacagaaaccaggacagccacccaaactcctcatctctgctgcatccaacgtagaatctggggtccctgccaggtttagtggcagtgggtctgggacagacttcagcctcaacatccatcctgtggaggaggatgatattgcaatgtatttctgtcagcaaagtaggaaggttccttggacgttcggtggaggcaccaagctggaaatcaaacggggtggcggtggctcgggcggaggtgggtcgggtggcggcggatctcaggtgcagctgaaggagtcaggacctggcctggtggcgccctcacagagcctgtccatcacatgcaccgtctcagggttctcattaaccggctatggtgtaaactgggttcgccagcctccaggaaagggtctggagtggctgggaatgatatggggtgatggaagcacagactataattcagctctcaaatccagactgagcatcaccaaggacaactccaagagccaagttttcttaaaaatgaacagtctgcaaactgatgacacagccagatactactgtgccagagatggttatagtaactttcattactatgttatggactactggggtcaaggaacctcagtcaccgtctcctcagatctggagcccaaatcttctgacaaaactcacacatccccaccgtccccagcacctgaactcctgggtggatcgtcagtcttcctcttccccccaaaacccaaggacaccctcatgatctcccggacccctgaggtcacatgcgtggtggtggacgtgagccacgaagaccctgaggtcaagttcaactggtacgtggacggcgtggaggtgcataatgccaagacaaagccgcgggaggagcagtacaacagcacgtaccgtgtggtcagcgtcctcaccgtcctgcaccaggactggctgaatggcaaggagtacaagtgcaaggtctccaacaaagccctcccagcccccatcgagaaaaccatctccaaagccaaagggcagccccgagaaccacaggtgtacaccctgcccccatcccgggatgagctgaccaagaaccaggtcagcctgacctgcctggtcaaaggcttctatcccagcgacatcgccgtggagtgggagagcaatgggcagccggagaacaactacaagaccacgcctcccgtgctggactccgacggctccttcttcctctacagcaagctcaccgtggacaagagcaggtggcagcaggggaacgtcttctcatgctccgtgatgcatgaggctctgcacaaccactacacgcagaagagcctctccctgtctccgggtaaagcggatccttcgaattcgaacatggagaacaacaaaacctcagtggattcaaaatccattaataattttgaagtaaagaccatacatgggagcaagtcagtggactctgggatctatctggacagtagttacaaaatggattatcctgaaatgggcatatgcataataattaataataagaacttccataagagcactggaatgtcatctcgctctggtacggatgtggacgcagccaacctcagagagacattcatgggcctgaaataccaagtcaggaataaaaatgatcttactcgtgaagacattttggaattaatggatagtgtttctaaggaagatcatagcaaaaggagcagctttgtgtgtgtgattctaagccatggtgatgaaggggtcatttatgggacaaatgggcctgttgaactgaaaaagttgactagcttcttcagaggcgactactgccggagtctgactggaaagccgaaactcttcatcattcaggcctgccggggtacggagctggactgtggcattgagacagacagtgggactgatgaggagatggcttgccagaagataccggtggaggctgacttcctgtatgcttactctacagcacctggttactattcctggagaaattcaaaggacgggtcgtggttcatccagtccctttgcagcatgctgaagctgtacgcgcacaagctagaatttatgcacattctcactcgcgttaacaggaaggtggcaacggaattcgagtccttctccctggactccactttccacgcaaagaaacagatcccgtgtattgtgtccatgctcacgaaagaactgtacttttatcactagctcgagatcgatga

SEQ ID NO: 456 - protein, 789 aa, Artificial sequence
  Description of Artificial Sequence: Synthetic amino acid sequence
MDFQVQIFSFLLISASVIMSRGVDIVLTQSPASLAVSLGQRATISCRASESVEYYVTSLMQWYQQKPGQPPKLLISAASNVESGVPARFSGSGSGTDFSLNIHPVEEDDIAMYFCQQSRKVPWTFGGGTKLEIKRGGGGSGGGGSGGGGSQVQLKESGPGLVAPSQSLSITCTVSGFSLTGYGVNWVRQPPGKGLEWLGMIWGDGSTDYNSALKSRLSITKDNSKSQVFLKMNSLQTDDTARYYCARDGYSNFHYYVMDYWGQGTSVTVSSDLEPKSSDKTHTSPPSPAPELLGGSSVFLFPPKPKDTLMISRTPEVTCVVVDVSHEDPEVKFNWYVDGVEVHNAKTKPREEQYNSTYRVVSVLTVLHQDWLNGKEYKCKVSNKALPAPIEKTISKAKGQPREPQVYTLPPSRDELTKNQVSLTCLVKGFYPSDIAVEWESNGQPENNYKTTPPVLDSDGSFFLYSKLTVDKSRWQQGNVFSCSVMHEALHNHYTQKSLSLSPGKADPSNSNMENNKTSVDSKSINNFEVKTIHGSKSVDSGIYLDSSYKMDYPEMGICIIINNKNFHKSTGMSSRSGTDVDAANLRETFMGLKYQVRNKNDLTREDILELMDSVSKEDHSKRSSFVCVILSHGDEGVIYGTNGPVELKKLTSFFRGDYCRSLTGKPKLFIIQACRGTELDCGIETDSGTDEEMACQKIPVEADFLYAYSTAPGYYSWRNSKDGSWFIQSLCSMLKLYAHKLEFMHILTRVNRKVATEFESFSLDSTFHAKKQIPCIVSMLTKELYFYH

SEQ ID NO: 457 - DNA, 1466 bp, Mus sp.
ttcgaacatggatttccagagttgtctttatgctattgctgaagaactgggcagtgaagacctggctgccctcaagttcctgtgcttggactacatcccacacaagaagcaggagaccatcgaggatgcccagaagctatttctgaggctgcgggaaaaggggatgttggaggaaggcaatctgtctttcctgaaagagctgcttttccacatcagtcggtgggacctgctggtcaacttcctagactgcaaccgagaggagatggtgagagagctgcgggatccagacaatgcccagatttctccctacagggtcatgctctttaagctctcagaagaagtgagcgagttggaattgagatcttttaagttccttttgaacaatgagatccccaaatgtaagctggaagatgacttgagcctgcttgaaatttttgtagaaatggagaagaggaccatgctggcagaaaataacttggaaaccctaaaatcaatctgtgaccaggtcaacaagagcctgctggggaagatcgaggattatgaaagatcaagcacagagagaagaatgagccttgaaggaagggaagagttgccaccttcagttttggatgagatgagcctcaaaatggcggaactgtgtgactcgccaagagaacaagacagtgagtcacggacttcagacaaagtttaccaaatgaagaacaaacctcggggatactgtctgatcatcaacaatcatgatttcagcaaggcccgggaagacataacccaactccgaaaaatgaaggacagaaaaggaacagactgtgataaagaggctctgagtaagacctttaaggagcttcattttgagatagtatcttacgacgactgcactgcaaatgaaatccacgagattctagaaggctaccaaagcgcagaccacaagaacaaagactgcttcatctgctgtatcctatcccacggtgacaagggtgtcgtctatggaacggatgggaaggaggcctccatctatgacctgacatcttacttcactggttcaaagtgcccttccctgtctgggaaacccaagatctttttcattcaggcttgccaaggaagtaacttccagaaaggagtgcctgatgaggcaggcttcgagcaacagaaccacactttagaagtggattcatcatctcacaagaactatattccggatgaggcagactttctgctgggaatggctacggtgaagaactgcgtttcctaccgagatcctgtgaatggaacctggtatattcagtcactttgccagagcctgagggaaagatgtcctcaaggagatgacattcttagcatcctgactggcgtgaactatgacgtgagcaataaagacgacaggaggaacaagggaaagcagatgccacagcccaccttcacactacggaagaagctcttcttccctccctaatgactcgagatcgatt

SEQ ID NO: 458 - protein, 482 aa, Mus sp.
SNMDFQSCLYAIAEELGSEDLAALKFLCLDYIPHKKQETIEDAQKLFLRLREKGMLEEGNLSFLKELLFHISRWDLLVNFLDCNREEMVRELRDPDNAQISPYRVMLFKLSEEVSELELRSFKFLLNNEIPKCKLEDDLSLLEIFVEMEKRTMLAENNLETLKSICDQVNKSLLGKIEDYERSSTERRMSLEGREELPPSVLDEMSLKMAELCDSPREQDSESRTSDKVYQMKNKPRGYCLIINNHDFSKAREDITQLRKMKDRKGTDCDKEALSKTFKELHFEIVSYDDCTANEIHEILEGYQSADHKNKDCFICCILSHGDKGVVYGTDGKEASIYDLTSYFTGSKCPSLSGKPKIFFIQACQGSNFQKGVPDEAGFEQQNHTLEVDSSSHKNYIPDEADFLLGMATVKNCVSYRDPVNGTWYIQSLCQSLRERCPQGDDILSILTGVNYDVSNKDDRRNKGKQMPQPTFTLRKKLFFPP

SEQ ID NO: 459 - DNA, 2995 bp, Artificial sequence
  Description of Artificial Sequence: Synthetic nucleotide sequence
aagcttatggattttcaagtgcagattttcagcttcctgctaatcagtgcttcagtcataatgtccagaggagtcgacattgtgctcacccaatctccagcttctttggctgtgtctctaggtcagagagccaccatctcctgcagagccagtgaaagtgttgaatattatgtcacaagtttaatgcagtggtaccaacagaaaccaggacagccacccaaactcctcatctctgctgcatccaacgtagaatctggggtccctgccaggtttagtggcagtgggtctgggacagacttcagcctcaacatccatcctgtggaggaggatgatattgcaatgtatttctgtcagcaaagtaggaaggttccttggacgttcggtggaggcaccaagctggaaatcaaacggggtggcggtggctcgggcggaggtgggtcgggtggcggcggatctcaggtgcagctgaaggagtcaggacctggcctggtggcgccctcacagagcctgtccatcacatgcaccgtctcagggttctcattaaccggctatggtgtaaactgggttcgccagcctccaggaaagggtctggagtggctgggaatgatatggggtgatggaagcacagactataattcagctctcaaatccagactgagcatcaccaaggacaactccaagagccaagttttcttaaaaatgaacagtctgcaaactgatgacacagccagatactactgtgccagagatggttatagtaactttcattactatgttatggactactggggtcaaggaacctcagtcaccgtctcctcagatctggagcccaaatcttctgacaaaactcacacatccccaccgtccccagcacctgaactcctgggtggaccgtcagtcttcctcttccccccaaaacccaaggacaccctcatgatctcccggacccctgaggtcacatgcgtggtggtggacgtgagccacgaagaccctgaggtcaagttcaactggtacgtggacggcgtggaggtgcataatgccaagacaaagccgcgggaggagcagtacaacagcacgtaccgtgtggtcagcgtcctcaccgtcctgcaccaggactggctgaatggcaaggagtacaagtgcaaggtctccaacaaagccctcccagcccccatcgagaaaaccatctccaaagccaaagggcagccccgagaaccacaggtgtacaccctgcccccatcccgggatgagctgaccaagaaccaggtcagcctgacctgcctggtcaaaggcttctatcccagcgacatcgccgtggagtgggagagcaatgggcagccggagaacaactacaagaccacgcctcccgtgctggactccgacggctccttcttcctctacagcaagctcaccgtggacaagagcaggtggcagcaggggaacgtcttctcatgctccgtgatgcatgaggctctgcacaaccactacacgcagaagagcctctccctgtctccgggtaaagcggatccttcgaacatggatttccagagttgtctttatgctattgctgaagaactgggcagtgaagacctggctgccctcaagttcctgtgcttggactacatcccacacaagaagcaggagaccatcgaggatgcccagaagctatttctgaggctgcgggaaaaggggatgttggaggaaggcaatctgtctttcctgaaagagctgcttttccacatcagtcggtgggacctgctggtcaacttcctagactgcaaccgagaggagatggtgagagagctgcgggatccagacaatgcccagatttctccctacagggtcatgctctttaagctctcagaagaagtgagcgagttggaattgagatcttttaagttccttttgaacaatgagatccccaaatgtaagctggaagatgacttgagcctgcttgaaatttttgtagaaatggagaagaggaccatgctggcagaaaataacttggaaaccctaaaatcaatctgtgaccaggtcaacaagagcctgctggggaagatcgaggattatgaaagatcaagcacagagagaagaatgagccttgaaggaagggaagagttgccaccttcagttttggatgagatgagcctcaaaatggcggaactgtgtgactcgccaagagaacaagacagtgagtcacggacttcagacaaagtttaccaaatgaagaacaaacctcggggatactgtctgatcatcaacaatcatgatttcagcaaggcccgggaagacataacccaactccgaaaaatgaaggacagaaaaggaacagactgtgataaagaggctctgagtaagacctttaaggagcttcattttgagatagtatcttacgacgactgcactgcaaatgaaatccacgagattctagaaggctaccaaagcgcagaccacaagaacaaagactgcttcatctgctgtatcctatcccacggtgacaagggtgtcgtctatggaacggatgggaaggaggcctccatctatgacctgacatcttacttcactggttcaaagtgcccttccctgtctgggaaacccaagatctttttcattcaggcttgccaaggaagtaacttccagaaaggagtgcctgatgaggcaggcttcgagcaacagaaccacactttagaagtggattcatcatctcacaagaactatattccggatgaggcagactttctgctgggaatggctacggtgaagaactgcgtttcctaccgagatcctgtgaatggaacctggtatattcagtcactttgccagagcctgagggaaagatgtcctcaaggagatgacattcttagcatcctgactggcgtgaactatgacgtgagcaataaagacgacaggaggaacaagggaaagcagatgccacagcccaccttcacactacggaagaagctcttcttccctccctaatgactcgagatcgatt

SEQ ID NO: 460 - protein, 990 aa, Artificial sequence
  Description of Artificial Sequence: Synthetic amino acid sequence
MDFQVQIFSFLLISASVIMSRGVDIVLTQSPASLAVSLGQRATISCRASESVEYYVTSLMQWYQQKPGQPPKLLISAASNVESGVPARFSGSGSGTDFSLNIHPVEEDDIAMYFCQQSRKVPWTFGGGTKLEIKRGGGGSGGGGSGGGGSQVQLKESGPGLVAPSQSLSITCTVSGFSLTGYGVNWVRQPPGKGLEWLGMIWGDGSTDYNSALKSRLSITKDNSKSQVFLKMNSLQTDDTARYYCARDGYSNFHYYVMDYWGQGTSVTVSSDLEPKSSDKTHTSPPSPAPELLGGPSVFLFPPKPKDTLMISRTPEVTCVVVDVSHEDPEVKFNWYVDGVEVHNAKTKPREEQYNSTYRVVSVLTVLHQDWLNGKEYKCKVSNKALPAPIEKTISKAKGQPREPQVYTLPPSRDELTKNQVSLTCLVKGFYPSDIAVEWESNGQPENNYKTTPPVLDSDGSFFLYSKLTVDKSRWQQGNVFSCSVMHEALHNHYTQKSLSLSPGKADPSNMDFQSCLYAIAEELGSEDLAALKFLCLDYIPHKKQETIEDAQKLFLRLREKGMLEEGNLSFLKELLFHISRWDLLVNFLDCNREEMVRELRDPDNAQISPYRVMLFKLSEEVSELELRSFKFLLNNEIPKCKLEDDLSLLEIFVEMEKRTMLAENNLETLKSICDQVNKSLLGKIEDYERSSTERRMSLEGREELPPSVLDEMSLKMAELCDSPREQDSESRTSDKVYQMKNKPRGYCLIINNHDFSKAREDITQLRKMKDRKGTDCDKEALSKTFKELHFEIVSYDDCTANEIHEILEGYQSADHKNKDCFICCILSHGDKGVVYGTDGKEASIYDLTSYFTGSKCPSLSGKPKIFFIQACQGSNFQKGVPDEAGFEQQNHTLEVDSSSHKNYIPDEADFLLGMATVKNCVSYRDPVNGTWYIQSLCQSLRERCPQGDDILSILTGVNYDVSNKDDRRNKGKQMPQPTFTLRKKLFFPP

SEQ ID NO: 461 - DNA, 2996 bp, Artificial sequence
  Description of Artificial Sequence: Synthetic nucleotide sequence
aagcttatggattttcaagtgcagattttcagcttcctgctaatcagtgcttcagtcataatgtccagaggagtcgacattgtgctcacccaatctccagcttctttggctgtgtctctaggtcagagagccaccatctcctgcagagccagtgaaagtgttgaatattatgtcacaagtttaatgcagtggtaccaacagaaaccaggacagccacccaaactcctcatctctgctgcatccaacgtagaatctggggtccctgccaggtttagtggcagtgggtctgggacagacttcagcctcaacatccatcctgtggaggaggatgatattgcaatgtatttctgtcagcaaagtaggaaggttccttggacgttcggtggaggcaccaagctggaaatcaaacggggtggcggtggctcgggcggaggtgggtcgggtggcggcggatctcaggtgcagctgaaggagtcaggacctggcctggtggcgccctcacagagcctgtccatcacatgcaccgtctcagggttctcattaaccggctatggtgtaaactgggttcgccagcctccaggaaagggtctggagtggctgggaatgatatggggtgatggaagcacagactataattcagctctcaaatccagactgagcatcaccaaggacaactccaagagccaagttttcttaaaaatgaacagtctgcaaactgatgacacagccagatactactgtgccagagatggttatagtaactttcattactatgttatggactactggggtcaaggaacctcagtcaccgtctcctcagatctggagcccaaatcttctgacaaaactcacacatccccaccgtccccagcacctgaactcctgggtggatcgtcagtcttcctcttccccccaaaacccaaggacaccctcatgatctcccggacccctgaggtcacatgcgtggtggtggacgtgagccacgaagaccctgaggtcaagttcaactggtacgtggacggcgtggaggtgcataatgccaagacaaagccgcgggaggagcagtacaacagcacgtaccgtgtggtcagcgtcctcaccgtcctgcaccaggactggctgaatggcaaggagtacaagtgcaaggtctccaacaaagccctcccagcccccatcgagaaaaccatctccaaagccaaagggcagccccgagaaccacaggtgtacaccctgcccccatcccgggatgagctgaccaagaaccaggtcagcctgacctgcctggtcaaaggcttctatcccagcgacatcgccgtggagtgggagagcaatgggcagccggagaacaactacaagaccacgcctcccgtgctggactccgacggctccttcttcctctacagcaagctcaccgtggacaagagcaggtggcagcaggggaacgtcttctcatgctccgtgatgcatgaggctctgcacaaccactacacgcagaagagcctctccctgtctccgggtaaagcggatccttcgaacatggatttccagagttgtctttatgctattgctgaagaactgggcagtgaagacctggctgccctcaagttcctgtgcttggactacatcccacacaagaagcaggagaccatcgaggatgcccagaagctatttctgaggctgcgggaaaaggggatgttggaggaaggcaatctgtctttcctgaaagagctgcttttccacatcagtcggtgggacctgctggtcaacttcctagactgcaaccgagaggagatggtgagagagctgcgggatccagacaatgcccagatttctccctacagggtcatgctctttaagctctcagaagaagtgagcgagttggaattgagatcttttaagttccttttgaacaatgagatccccaaatgtaagctggaagatgacttgagcctgcttgaaatttttgtagaaatggagaagaggaccatgctggcagaaaataacttggaaaccctaaaatcaatctgtgaccaggtcaacaagagcctgctggggaagatcgaggattatgaaagatcaagcacagagagaagaatgagccttgaaggaagggaagagttgccaccttcagttttggatgagatgagcctcaaaatggcggaactgtgtgactcgccaagagaacaagacagtgagtcacggacttcagacaaagtttaccaaatgaagaacaaacctcggggatactgtctgatcatcaacaatcatgatttcagcaaggcccgggaagacataacccaactccgaaaaatgaaggacagaaaaggaacagactgtgataaagaggctctgagtaagacctttaaggagcttcattttgagatagtatcttacgacgactgcactgcaaatgaaatccacgagattctagaaggctaccaaagcgcagaccacaagaacaaagactgcttcatctgctgtatcctatcccacggtgacaagggtgtcgtctatggaacggatgggaaggaggcctccatctatgacctgacatcttacttcactggttcaaagtgcccttccctgtctgggaaacccaagatctttttcattcaggcttgccaaggaagtaacttccagaaaggagtgcctgatgaggcaggcttcgagcaacagaaccacactttagaagtggattcatcatctcacaagaactatattccggatgaggcagactttctgctgggaatggctacggtgaagaactgcgtttcctaccgagatcctgtgaatggaacctggtatattcagtcactttgccagagcctgagggaaagatgtcctcaaggagatgacattcttagcatcctgactggcgtgaactatgacgtgagcaataaagacgacaggaggaacaagggaaagcagatgccacagcccaccttcacactacggaagaagctcttcttccctccctaatgactcgagatcgattc

SEQ ID NO: 462 - protein, 990 aa, Artificial sequence
  Description of Artificial Sequence: Synthetic amino acid sequence
MDFQVQIFSFLLISASVIMSRGVDIVLTQSPASLAVSLGQRATISCRASESVEYYVTSLMQWYQQKPGQPPKLLISAASNVESGVPARFSGSGSGTDFSLNIHPVEEDDIAMYFCQQSRKVPWTFGGGTKLEIKRGGGGSGGGGSGGGGSQVQLKESGPGLVAPSQSLSITCTVSGFSLTGYGVNWVRQPPGKGLEWLGMIWGDGSTDYNSALKSRLSITKDNSKSQVFLKMNSLQTDDTARYYCARDGYSNFHYYVMDYWGQGTSVTVSSDLEPKSSDKTHTSPPSPAPELLGGSSVFLFPPKPKDTLMISRTPEVTCVVVDVSHEDPEVKFNWYVDGVEVHNAKTKPREEQYNSTYRVVSVLTVLHQDWLNGKEYKCKVSNKALPAPIEKTISKAKGQPREPQVYTLPPSRDELTKNQVSLTCLVKGFYPSDIAVEWESNGQPENNYKTTPPVLDSDGSFFLYSKLTVDKSRWQQGNVFSCSVMHEALHNHYTQKSLSLSPGKADPSNMDFQSCLYAIAEELGSEDLAALKFLCLDYIPHKKQETIEDAQKLFLRLREKGMLEEGNLSFLKELLFHISRWDLLVNFLDCNREEMVRELRDPDNAQISPYRVMLFKLSEEVSELELRSFKFLLNNEIPKCKLEDDLSLLEIFVEMEKRTMLAENNLETLKSICDQVNKSLLGKIEDYERSSTERRMSLEGREELPPSVLDEMSLKMAELCDSPREQDSESRTSDKVYQMKNKPRGYCLIINNHDFSKAREDITQLRKMKDRKGTDCDKEALSKTFKELHFEIVSYDDCTANEIHEILEGYQSADHKNKDCFICCILSHGDKGVVYGTDGKEASIYDLTSYFTGSKCPSLSGKPKIFFIQACQGSNFQKGVPDEAGFEQQNHTLEVDSSSHKNYIPDEADFLLGMATVKNCVSYRDPVNGTWYIQSLCQSLRERCPQGDDILSILTGVNYDVSNKDDRRNKGKQMPQPTFTLRKKLFFPP

SEQ ID NO: 463 - DNA, 860 bp, Homo sapiens
ggatccttcgaacatggagaacactgaaaactcagtggattcaaaatccattaaaaatttggaaccaaagatcatacatggaagcgaatcaatggactctggaatatccctggacaacagttataaaatggattatcctgagatgggtttatgtataataattaataataagaattttcataaaagcactggaatgacatctcggtctggtacagatgtcgatgcagcaaacctcagggaaacattcagaaacttgaaatatgaagtcaggaataaaaatgatcttacacgtgaagaaattgtggaattgatgcgtgatgtttctaaagaagatcacagcaaaaggagcagttttgtttgtgtgcttctgagccatggtgaagaaggaataatttttggaacaaatggacctgttgacctgaaaaaaataacaaactttttcagaggggatcgttgtagaagtctaactggaaaacccaaacttttcattattcaggcctgccgtggtacagaactggactgtggcattgagacagacagtggtgttgatgatgacatggcgtgtcataaaataccagtggaggccgacttcttgtatgcatactccacagcacctggttattattcttggcgaaattcaaaggatggctcctggttcatccagtcgctttgtgccatgctgaaacagtatgccgacaagcttgaatttatgcacattcttacccgggttaaccgaaaggtggcaacagaatttgagtccttttcctttgacgctacttttcatgcaaagaaacagattccatgtattgtttccatgctcacaaaagaactctatttttatcactaactcgagatcgata

SEQ ID NO: 464 - protein, 281 aa, Homo sapiens
DPSNMENTENSVDSKSIKNLEPKIIHGSESMDSGISLDNSYKMDYPEMGLCIIINNKNFHKSTGMTSRSGTDVDAANLRETFRNLKYEVRNKNDLTREEIVELMRDVSKEDHSKRSSFVCVLLSHGEEGIIFGTNGPVDLKKITNFFRGDRCRSLTGKPKLFIIQACRGTELDCGIETDSGVDDDMACHKIPVEADFLYAYSTAPGYYSWRNSKDGSWFIQSLCAMLKQYADKLEFMHILTRVNRKVATEFESFSFDATFHAKKQIPCIVSMLTKELYFYH

SEQ ID NO: 465 - DNA, 2383 bp, Artificial sequence
  Description of Artificial Sequence: Synthetic nucleotide sequence
aagcttatggattttcaagtgcagattttcagcttcctgctaatcagtgcttcagtcataatgtccagaggagtcgacattgtgctcacccaatctccagcttctttggctgtgtctctaggtcagagagccaccatctcctgcagagccagtgaaagtgttgaatattatgtcacaagtttaatgcagtggtaccaacagaaaccaggacagccacccaaactcctcatctctgctgcatccaacgtagaatctggggtccctgccaggtttagtggcagtgggtctgggacagacttcagcctcaacatccatcctgtggaggaggatgatattgcaatgtatttctgtcagcaaagtaggaaggttccttggacgttcggtggaggcaccaagctggaaatcaaacggggtggcggtggctcgggcggaggtgggtcgggtggcggcggatctcaggtgcagctgaaggagtcaggacctggcctggtggcgccctcacagagcctgtccatcacatgcaccgtctcagggttctcattaaccggctatggtgtaaactgggttcgccagcctccaggaaagggtctggagtggctgggaatgatatggggtgatggaagcacagactataattcagctctcaaatccagactgagcatcaccaaggacaactccaagagccaagttttcttaaaaatgaacagtctgcaaactgatgacacagccagatactactgtgccagagatggttatagtaactttcattactatgttatggactactggggtcaaggaacctcagtcaccgtctcctcagatctggagcccaaatcttctgacaaaactcacacatccccaccgtccccagcacctgaactcctgggtggaccgtcagtcttcctcttccccccaaaacccaaggacaccctcatgatctcccggacccctgaggtcacatgcgtggtggtggacgtgagccacgaagaccctgaggtcaagttcaactggtacgtggacggcgtggaggtgcataatgccaagacaaagccgcgggaggagcagtacaacagcacgtaccgtgtggtcagcgtcctcaccgtcctgcaccaggactggctgaatggcaaggagtacaagtgcaaggtctccaacaaagccctcccagcccccatcgagaaaaccatctccaaagccaaagggcagccccgagaaccacaggtgtacaccctgcccccatcccgggatgagctgaccaagaaccaggtcagcctgacctgcctggtcaaaggcttctatcccagcgacatcgccgtggagtgggagagcaatgggcagccggagaacaactacaagaccacgcctcccgtgctggactccgacggctccttcttcctctacagcaagctcaccgtggacaagagcaggtggcagcaggggaacgtcttctcatgctccgtgatgcatgaggctctgcacaaccactacacgcagaagagcctctccctgtctccgggtaaagcggatccttcgaacatggagaacactgaaaactcagtggattcaaaatccattaaaaatttggaaccaaagatcatacatggaagcgaatcaatggactctggaatatccctggacaacagttataaaatggattatcctgagatgggtttatgtataataattaataataagaattttcataaaagcactggaatgacatctcggtctggtacagatgtcgatgcagcaaacctcagggaaacattcagaaacttgaaatatgaagtcaggaataaaaatgatcttacacgtgaagaaattgtggaattgatgcgtgatgtttctaaagaagatcacagcaaaaggagcagttttgtttgtgtgcttctgagccatggtgaagaaggaataatttttggaacaaatggacctgttgacctgaaaaaaataacaaactttttcagaggggatcgttgtagaagtctaactggaaaacccaaacttttcattattcaggcctgccgtggtacagaactggactgtggcattgagacagacagtggtgttgatgatgacatggcgtgtcataaaataccagtggaggccgacttcttgtatgcatactccacagcacctggttattattcttggcgaaattcaaaggatggctcctggttcatccagtcgctttgtgccatgctgaaacagtatgccgacaagcttgaatttatgcacattcttacccgggttaaccgaaaggtggcaacagaatttgagtccttttcctttgacgctacttttcatgcaaagaaacagattccatgtattgtttccatgctcacaaaagaactctatttttatcactaactcgagatcgata

SEQ ID NO: 466 - protein, 787 aa, Artificial sequence
  Description of Artificial Sequence: Synthetic amino acid sequence
MDFQVQIFSFLLISASVIMSRGVDIVLTQSPASLAVSLGQRATISCRASESVEYYVTSLMQWYQQKPGQPPKLLISAASNVESGVPARFSGSGSGTDFSLNIHPVEEDDIAMYFCQQSRKVPWTFGGGTKLEIKRGGGGSGGGGSGGGGSQVQLKESGPGLVAPSQSLSITCTVSGFSLTGYGVNWVRQPPGKGLEWLGMIWGDGSTDYNSALKSRLSITKDNSKSQVFLKMNSLQTDDTARYYCARDGYSNFHYYVMDYWGQGTSVTVSSDLEPKSSDKTHTSPPSPAPELLGGPSVFLFPPKPKDTLMISRTPEVTCVVVDVSHEDPEVKFNWYVDGVEVHNAKTKPREEQYNSTYRVVSVLTVLHQDWLNGKEYKCKVSNKALPAPIEKTISKAKGQPREPQVYTLPPSRDELTKNQVSLTCLVKGFYPSDIAVEWESNGQPENNYKTTPPVLDSDGSFFLYSKLTVDKSRWQQGNVFSCSVMHEALHNHYTQKSLSLSPGKADPSNMENTENSVDSKSIKNLEPKIIHGSESMDSGISLDNSYKMDYPEMGLCIIINNKNFHKSTGMTSRSGTDVDAANLRETFRNLKYEVRNKNDLTREEIVELMRDVSKEDHSKRSSFVCVLLSHGEEGIIFGTNGPVDLKKITNFFRGDRCRSLTGKPKLFIIQACRGTELDCGIETDSGVDDDMACHKIPVEADFLYAYSTAPGYYSWRNSKDGSWFIQSLCAMLKQYADKLEFMHILTRVNRKVATEFESFSFDATFHAKKQIPCIVSMLTKELYFYH

SEQ ID NO: 467 - DNA, 2384 bp, Artificial sequence
  Description of Artificial Sequence: Synthetic nucleotide sequence
aagcttatggattttcaagtgcagattttcagcttcctgctaatcagtgcttcagtcataatgtccagaggagtcgacattgtgctcacccaatctccagcttctttggctgtgtctctaggtcagagagccaccatctcctgcagagccagtgaaagtgttgaatattatgtcacaagtttaatgcagtggtaccaacagaaaccaggacagccacccaaactcctcatctctgctgcatccaacgtagaatctggggtccctgccaggtttagtggcagtgggtctgggacagacttcagcctcaacatccatcctgtggaggaggatgatattgcaatgtatttctgtcagcaaagtaggaaggttccttggacgttcggtggaggcaccaagctggaaatcaaacggggtggcggtggctcgggcggaggtgggtcgggtggcggcggatctcaggtgcagctgaaggagtcaggacctggcctggtggcgccctcacagagcctgtccatcacatgcaccgtctcagggttctcattaaccggctatggtgtaaactgggttcgccagcctccaggaaagggtctggagtggctgggaatgatatggggtgatggaagcacagactataattcagctctcaaatccagactgagcatcaccaaggacaactccaagagccaagttttcttaaaaatgaacagtctgcaaactgatgacacagccagatactactgtgccagagatggttatagtaactttcattactatgttatggactactggggtcaaggaacctcagtcaccgtctcctcagatctggagcccaaatcttctgacaaaactcacacatccccaccgtccccagcacctgaactcctgggtggatcgtcagtcttcctcttccccccaaaacccaaggacaccctcatgatctcccggacccctgaggtcacatgcgtggtggtggacgtgagccacgaagaccctgaggtcaagttcaactggtacgtggacggcgtggaggtgcataatgccaagacaaagccgcgggaggagcagtacaacagcacgtaccgtgtggtcagcgtcctcaccgtcctgcaccaggactggctgaatggcaaggagtacaagtgcaaggtctccaacaaagccctcccagcccccatcgagaaaaccatctccaaagccaaagggcagccccgagaaccacaggtgtacaccctgcccccatcccgggatgagctgaccaagaaccaggtcagcctgacctgcctggtcaaaggcttctatcccagcgacatcgccgtggagtgggagagcaatgggcagccggagaacaactacaagaccacgcctcccgtgctggactccgacggctccttcttcctctacagcaagctcaccgtggacaagagcaggtggcagcaggggaacgtcttctcatgctccgtgatgcatgaggctctgcacaaccactacacgcagaagagcctctccctgtctccgggtaaagcggatccttcgaacatggagaacactgaaaactcagtggattcaaaatccattaaaaatttggaaccaaagatcatacatggaagcgaatcaatggactctggaatatccctggacaacagttataaaatggattatcctgagatgggtttatgtataataattaataataagaattttcataaaagcactggaatgacatctcggtctggtacagatgtcgatgcagcaaacctcagggaaacattcagaaacttgaaatatgaagtcaggaataaaaatgatcttacacgtgaagaaattgtggaattgatgcgtgatgtttctaaagaagatcacagcaaaaggagcagttttgtttgtgtgcttctgagccatggtgaagaaggaataatttttggaacaaatggacctgttgacctgaaaaaaataacaaactttttcagaggggatcgttgtagaagtctaactggaaaacccaaacttttcattattcaggcctgccgtggtacagaactggactgtggcattgagacagacagtggtgttgatgatgacatggcgtgtcataaaataccagtggaggccgacttcttgtatgcatactccacagcacctggttattattcttggcgaaattcaaaggatggctcctggttcatccagtcgctttgtgccatgctgaaacagtatgccgacaagcttgaatttatgcacattcttacccgggttaaccgaaaggtggcaacagaatttgagtccttttcctttgacgctacttttcatgcaaagaaacagattccatgtattgtttccatgctcacaaaagaactctatttttatcactaactcgagatcgataa

SEQ ID NO: 468 - protein, 787 aa, Artificial sequence
  Description of Artificial Sequence: Synthetic amino acid sequence
MDFQVQIFSFLLISASVIMSRGVDIVLTQSPASLAVSLGQRATISCRASESVEYYVTSLMQWYQQKPGQPPKLLISAASNVESGVPARFSGSGSGTDFSLNIHPVEEDDIAMYFCQQSRKVPWTFGGGTKLEIKRGGGGSGGGGSGGGGSQVQLKESGPGLVAPSQSLSITCTVSGFSLTGYGVNWVRQPPGKGLEWLGMIWGDGSTDYNSALKSRLSITKDNSKSQVFLKMNSLQTDDTARYYCARDGYSNFHYYVMDYWGQGTSVTVSSDLEPKSSDKTHTSPPSPAPELLGGSSVFLFPPKPKDTLMISRTPEVTCVVVDVSHEDPEVKFNWYVDGVEVHNAKTKPREEQYNSTYRVVSVLTVLHQDWLNGKEYKCKVSNKALPAPIEKTISKAKGQPREPQVYTLPPSRDELTKNQVSLTCLVKGFYPSDIAVEWESNGQPENNYKTTPPVLDSDGSFFLYSKLTVDKSRWQQGNVFSCSVMHEALHNHYTQKSLSLSPGKADPSNMENTENSVDSKSIKNLEPKIIHGSESMDSGISLDNSYKMDYPEMGLCIIINNKNFHKSTGMTSRSGTDVDAANLRETFRNLKYEVRNKNDLTREEIVELMRDVSKEDHSKRSSFVCVLLSHGEEGIIFGTNGPVDLKKITNFFRGDRCRSLTGKPKLFIIQACRGTELDCGIETDSGVDDDMACHKIPVEADFLYAYSTAPGYYSWRNSKDGSWFIQSLCAMLKQYADKLEFMHILTRVNRKVATEFESFSFDATFHAKKQIPCIVSMLTKELYFYH

SEQ ID NO: 469 - DNA, 1466 bp, Homo sapiens
ggatccttcgaacatggacttcagcagaaatctttatgatattggggaacaactggacagtgaagatctggcctccctcaagttcctgagcctggactacattccgcaaaggaagcaagaacccatcaaggatgccttgatgttattccagagactccaggaaaagagaatgttggaggaaagcaatctgtccttcctgaaggagctgctcttccgaattaatagactggatttgctgattacctacctaaacactagaaaggaggagatggaaagggaacttcagacaccaggcagggctcaaatttctgcctacagggtcatgctctatcagatttcagaagaagtgagcagatcagaattgaggtcttttaagtttcttttgcaagaggaaatctccaaatgcaaactggatgatgacatgaacctgctggatattttcatagagatggagaagagggtcatcctgggagaaggaaagttggacatcctgaaaagagtctgtgcccaaatcaacaagagcctgctgaagataatcaacgactatgaagaattcagcaaagagagaagcagcagccttgaaggaagtcctgatgaattttcaaatggggaggagttgtgtggggtaatgacaatctcggactctccaagagaacaggatagtgaatcacagactttggacaaagtttaccaaatgaaaagcaaacctcggggatactgtctgatcatcaacaatcacaattttgcaaaagcacgggagaaagtgcccaaacttcacagcattagggacaggaatggaacacacttggatgcaggggctttgaccacgacctttgaagagcttcattttgagatcaagccccacgatgactgcacagtagagcaaatctatgagattttgaaaatctaccaactcatggaccacagtaacatggactgcttcatctgctgtatcctctcccatggagacaagggcatcatctatggcactgatggacaggaggcccccatctatgagctgacatctcagttcactggtttgaagtgcccttcccttgctggaaaacccaaagtgttttttattcaggcttgtcagggggataactaccagaaaggtatacctgttgagactgattcagaggagcaaccctatttagaaatggatttatcatcacctcaaacgagatatatcccggatgaggctgactttctgctggggatggccactgtgaataactgtgtttcctaccgaaaccctgcagagggaacctggtacatccagtcactttgccagagcctgagagagcgatgtcctcgaggcgatgatattctcaccatcctgactgaagtgaactatgaagtaagcaacaaggatgacaagaaaaacatggggaaacagatgcctcagcctactttcacactaagaaaaaaacttgtcttcccttctgattgagcatgcatcgata

SEQ ID NO: 470 - protein, 483 aa, Homo sapiens
DPSNMDFSRNLYDIGEQLDSEDLASLKFLSLDYIPQRKQEPIKDALMLFQRLQEKRMLEESNLSFLKELLFRINRLDLLITYLNTRKEEMERELQTPGRAQISAYRVMLYQISEEVSRSELRSFKFLLQEEISKCKLDDDMNLLDIFIEMEKRVILGEGKLDILKRVCAQINKSLLKIINDYEEFSKERSSSLEGSPDEFSNGEELCGVMTISDSPREQDSESQTLDKVYQMKSKPRGYCLIINNHNFAKAREKVPKLHSIRDRNGTHLDAGALTTTFEELHFEIKPHDDCTVEQIYEILKIYQLMDHSNMDCFICCILSHGDKGIIYGTDGQEAPIYELTSQFTGLKCPSLAGKPKVFFIQACQGDNYQKGIPVETDSEEQPYLEMDLSSPQTRYIPDEADFLLGMATVNNCVSYRNPAEGTWYIQSLCQSLRERCPRGDDILTILTEVNYEVSNKDDKKNMGKQMPQPTFTLRKKLVFPSD

SEQ ID NO: 471 - DNA, 1421 bp, Homo sapiens
ggatccttcgaacatggacttcagcagaaatctttatgatattggggaacaactggacagtgaagatctggcctccctcaagttcctgagcctggactacattccgcaaaggaagcaagaacccatcaaggatgccttgatgttattccagagactccaggaaaagagaatgttggaggaaagcaatctgtccttcctgaaggagctgctcttccgaattaatagactggatttgctgattacctacctaaacactagaaaggaggagatggaaagggaacttcagacaccaggcagggctcaaatttctgcctacagggtcatgctctatcagatttcagaagaagtgagcagatcagaattgaggtcttttaagtttcttttgcaagaggaaatctccaaatgcaaactggatgatgacatgaacctgctggatattttcatagagatggagaagagggtcatcctgggagaaggaaagttggacatcctgaaaagagtctgtgcccaaatcaacaagagcctgctgaagataatcaacgactatgaagaattcagcaaaggggaggagttgtgtggggtaatgacaatctcggactctccaagagaacaggatagtgaatcacagactttggacaaagtttaccaaatgaaaagcaaacctcggggatactgtctgatcatcaacaatcacaattttgcaaaagcacgggagaaagtgcccaaacttcacagcattagggacaggaatggaacacacttggatgcaggggctttgaccacgacctttgaagagcttcattttgagatcaagccccacgatgactgcacagtagagcaaatctatgagattttgaaaatctaccaactcatggaccacagtaacatggactgcttcatctgctgtatcctctcccatggagacaagggcatcatctatggcactgatggacaggaggcccccatctatgagctgacatctcagttcactggtttgaagtgcccttcccttgctggaaaacccaaagtgttttttattcaggcttgtcagggggataactaccagaaaggtatacctgttgagactgattcagaggagcaaccctatttagaaatggatttatcatcacctcaaacgagatatatcccggatgaggctgactttctgctggggatggccactgtgaataactgtgtttcctaccgaaaccctgcagagggaacctggtacatccagtcactttgccagagcctgagagagcgatgtcctcgaggcgatgatattctcaccatcctgactgaagtgaactatgaagtaagcaacaaggatgacaagaaaaacatggggaaacagatgcctcagcctactttcacactaagaaaaaaacttgtcttcccttctgattgagcatgcatcgata

SEQ ID NO: 472 - protein, 468 aa, Homo sapiens
DPSNMDFSRNLYDIGEQLDSEDLASLKFLSLDYIPQRKQEPIKDALMLFQRLQEKRMLEESNLSFLKELLFRINRLDLLITYLNTRKEEMERELQTPGRAQISAYRVMLYQISEEVSRSELRSFKFLLQEEISKCKLDDDMNLLDIFIEMEKRVILGEGKLDILKRVCAQINKSLLKIINDYEEFSKGEELCGVMTISDSPREQDSESQTLDKVYQMKSKPRGYCLIINNHNFAKAREKVPKLHSIRDRNGTHLDAGALTTTFEELHFEIKPHDDCTVEQIYEILKIYQLMDHSNMDCFICCILSHGDKGIIYGTDGQEAPIYELTSQFTGLKCPSLAGKPKVFFIQACQGDNYQKGIPVETDSEEQPYLEMDLSSPQTRYIPDEADFLLGMATVNNCVSYRNPAEGTWYIQSLCQSLRERCPRGDDILTILTEVNYEVSNKDDKKNMGKQMPQPTFTLRKKLVFPSD

SEQ ID NO: 473 - DNA, 2989 bp, Artificial sequence
  Description of Artificial Sequence: Synthetic nucleotide sequence
aagcttatggattttcaagtgcagattttcagcttcctgctaatcagtgcttcagtcataatgtccagaggagtcgacattgtgctcacccaatctccagcttctttggctgtgtctctaggtcagagagccaccatctcctgcagagccagtgaaagtgttgaatattatgtcacaagtttaatgcagtggtaccaacagaaaccaggacagccacccaaactcctcatctctgctgcatccaacgtagaatctggggtccctgccaggtttagtggcagtgggtctgggacagacttcagcctcaacatccatcctgtggaggaggatgatattgcaatgtatttctgtcagcaaagtaggaaggttccttggacgttcggtggaggcaccaagctggaaatcaaacggggtggcggtggctcgggcggaggtgggtcgggtggcggcggatctcaggtgcagctgaaggagtcaggacctggcctggtggcgccctcacagagcctgtccatcacatgcaccgtctcagggttctcattaaccggctatggtgtaaactgggttcgccagcctccaggaaagggtctggagtggctgggaatgatatggggtgatggaagcacagactataattcagctctcaaatccagactgagcatcaccaaggacaactccaagagccaagttttcttaaaaatgaacagtctgcaaactgatgacacagccagatactactgtgccagagatggttatagtaactttcattactatgttatggactactggggtcaaggaacctcagtcaccgtctcctcagatctggagcccaaatcttctgacaaaactcacacatccccaccgtccccagcacctgaactcctgggtggaccgtcagtcttcctcttccccccaaaacccaaggacaccctcatgatctcccggacccctgaggtcacatgcgtggtggtggacgtgagccacgaagaccctgaggtcaagttcaactggtacgtggacggcgtggaggtgcataatgccaagacaaagccgcgggaggagcagtacaacagcacgtaccgtgtggtcagcgtcctcaccgtcctgcaccaggactggctgaatggcaaggagtacaagtgcaaggtctccaacaaagccctcccagcccccatcgagaaaaccatctccaaagccaaagggcagccccgagaaccacaggtgtacaccctgcccccatcccgggatgagctgaccaagaaccaggtcagcctgacctgcctggtcaaaggcttctatcccagcgacatcgccgtggagtgggagagcaatgggcagccggagaacaactacaagaccacgcctcccgtgctggactccgacggctccttcttcctctacagcaagctcaccgtggacaagagcaggtggcagcaggggaacgtcttctcatgctccgtgatgcatgaggctctgcacaaccactacacgcagaagagcctctccctgtctccgggtaaagcggatccttcgaacatggacttcagcagaaatctttatgatattggggaacaactggacagtgaagatctggcctccctcaagttcctgagcctggactacattccgcaaaggaagcaagaacccatcaaggatgccttgatgttattccagagactccaggaaaagagaatgttggaggaaagcaatctgtccttcctgaaggagctgctcttccgaattaatagactggatttgctgattacctacctaaacactagaaaggaggagatggaaagggaacttcagacaccaggcagggctcaaatttctgcctacagggtcatgctctatcagatttcagaagaagtgagcagatcagaattgaggtcttttaagtttcttttgcaagaggaaatctccaaatgcaaactggatgatgacatgaacctgctggatattttcatagagatggagaagagggtcatcctgggagaaggaaagttggacatcctgaaaagagtctgtgcccaaatcaacaagagcctgctgaagataatcaacgactatgaagaattcagcaaagagagaagcagcagccttgaaggaagtcctgatgaattttcaaatggggaggagttgtgtggggtaatgacaatctcggactctccaagagaacaggatagtgaatcacagactttggacaaagtttaccaaatgaaaagcaaacctcggggatactgtctgatcatcaacaatcacaattttgcaaaagcacgggagaaagtgcccaaacttcacagcattagggacaggaatggaacacacttggatgcaggggctttgaccacgacctttgaagagcttcattttgagatcaagccccacgatgactgcacagtagagcaaatctatgagattttgaaaatctaccaactcatggaccacagtaacatggactgcttcatctgctgtatcctctcccatggagacaagggcatcatctatggcactgatggacaggaggcccccatctatgagctgacatctcagttcactggtttgaagtgcccttcccttgctggaaaacccaaagtgttttttattcaggcttgtcagggggataactaccagaaaggtatacctgttgagactgattcagaggagcaaccctatttagaaatggatttatcatcacctcaaacgagatatatcccggatgaggctgactttctgctggggatggccactgtgaataactgtgtttcctaccgaaaccctgcagagggaacctggtacatccagtcactttgccagagcctgagagagcgatgtcctcgaggcgatgatattctcaccatcctgactgaagtgaactatgaagtaagcaacaaggatgacaagaaaaacatggggaaacagatgcctcagcctactttcacactaagaaaaaaacttgtcttcccttctgattgagcatgcatcgata

SEQ ID NO: 474 - protein, 989 aa, Artificial sequence [sequence omitted]

SEQ ID NO: 475 - DNA, 2990 bp, Artificial sequence
  Description of Artificial Sequence: Synthetic nucleotide sequence
aagcttatggattttcaagtgcagattttcagcttcctgctaatcagtgcttcagtcataatgtccagaggagtcgacattgtgctcacccaatctccagcttctttggctgtgtctctaggtcagagagccaccatctcctgcagagccagtgaaagtgttgaatattatgtcacaagtttaatgcagtggtaccaacagaaaccaggacagccacccaaactcctcatctctgctgcatccaacgtagaatctggggtccctgccaggtttagtggcagtgggtctgggacagacttcagcctcaacatccatcctgtggaggaggatgatattgcaatgtatttctgtcagcaaagtaggaaggttccttggacgttcggtggaggcaccaagctggaaatcaaacggggtggcggtggctcgggcggaggtgggtcgggtggcggcggatctcaggtgcagctgaaggagtcaggacctggcctggtggcgccctcacagagcctgtccatcacatgcaccgtctcagggttctcattaaccggctatggtgtaaactgggttcgccagcctccaggaaagggtctggagtggctgggaatgatatggggtgatggaagcacagactataattcagctctcaaatccagactgagcatcaccaaggacaactccaagagccaagttttcttaaaaatgaacagtctgcaaactgatgacacagccagatactactgtgccagagatggttatagtaactttcattactatgttatggactactggggtcaaggaacctcagtcaccgtctcctcagatctggagcccaaatcttctgacaaaactcacacatccccaccgtccccagcacctgaactcctgggtggatcgtcagtcttcctcttccccccaaaacccaaggacaccctcatgatctcccggacccctgaggtcacatgcgtggtggtggacgtgagccacgaagaccctgaggtcaagttcaactggtacgtggacggcgtggaggtgcataatgccaagacaaagccgcgggaggagcagtacaacagcacgtaccgtgtggtcagcgtcctcaccgtcctgcaccaggactggctgaatggcaaggagtacaagtgcaaggtctccaacaaagccctcccagcccccatcgagaaaaccatctccaaagccaaagggcagccccgagaaccacaggtgtacaccctgcccccatcccgggatgagctgaccaagaaccaggtcagcctgacctgcctggtcaaaggcttctatcccagcgacatcgccgtggagtgggagagcaatgggcagccggagaacaactacaagaccacgcctcccgtgctggactccgacggctccttcttcctctacagcaagctcaccgtggacaagagcaggtggcagcaggggaacgtcttctcatgctccgtgatgcatgaggctctgcacaaccactacacgcagaagagcctctccctgtctccgggtaaagcggatccttcgaacatggacttcagcagaaatctttatgatattggggaacaactggacagtgaagatctggcctccctcaagttcctgagcctggactacattccgcaaaggaagcaagaacccatcaaggatgccttgatgttattccagagactccaggaaaagagaatgttggaggaaagcaatctgtccttcctgaaggagctgctcttccgaattaatagactggatttgctgattacctacctaaacactagaaaggaggagatggaaagggaacttcagacaccaggcagggctcaaatttctgcctacagggtcatgctctatcagatttcagaagaagtgagcagatcagaattgaggtcttttaagtttcttttgcaagaggaaatctccaaatgcaaactggatgatgacatgaacctgctggatattttcatagagatggagaagagggtcatcctgggagaaggaaagttggacatcctgaaaagagtctgtgcccaaatcaacaagagcctgctgaagataatcaacgactatgaagaattcagcaaagagagaagcagcagccttgaaggaagtcctgatgaattttcaaatggggaggagttgtgtggggtaatgacaatctcggactctccaagagaacaggatagtgaatcacagactttggacaaagtttaccaaatgaaaagcaaacctcggggatactgtctgatcatcaacaatcacaattttgcaaaagcacgggagaaagtgcccaaacttcacagcattagggacaggaatggaacacacttggatgcaggggctttgaccacgacctttgaagagcttcattttgagatcaagccccacgatgactgcacagtagagcaaatctatgagattttgaaaatctaccaactcatggaccacagtaacatggactgcttcatctgctgtatcctctcccatggagacaagggcatcatctatggcactgatggacaggaggcccccatctatgagctgacatctcagttcactggtttgaagtgcccttcccttgctggaaaacccaaagtgttttttattcaggcttgtcagggggataactaccagaaaggtatacctgttgagactgattcagaggagcaaccctatttagaaatggatttatcatcacctcaaacgagatatatcccggatgaggctgactttctgctggggatggccactgtgaataactgtgtttcctaccgaaaccctgcagagggaacctggtacatccagtcactttgccagagcctgagagagcgatgtcctcgaggcgatgatattctcaccatcctgactgaagtgaactatgaagtaagcaacaaggatgacaagaaaaacatggggaaacagatgcctcagcctactttcacactaagaaaaaaacttgtcttcccttctgattgagcatgcatcgataa

SEQ ID NO: 476 - protein, 989 aa, Artificial sequence
  Description of Artificial Sequence: Synthetic amino acid sequence
MDFQVQIFSFLLISASVIMSRGVDIVLTQSPASLAVSLGQRATISCRASESVEYYVTSLMQWYQQKPGQPPKLLISAASNVESGVPARFSGSGSGTDFSLNIHPVEEDDIAMYFCQQSRKVPWTFGGGTKLEIKRGGGGSGGGGSGGGGSQVQLKESGPGLVAPSQSLSITCTVSGFSLTGYGVNWVRQPPGKGLEWLGMIWGDGSTDYNSALKSRLSITKDNSKSQVFLKMNSLQTDDTARYYCARDGYSNFHYYVMDYWGQGTSVTVSSDLEPKSSDKTHTSPPSPAPELLGGSSVFLFPPKPKDTLMISRTPEVTCVVVDVSHEDPEVKFNWYVDGVEVHNAKTKPREEQYNSTYRVVSVLTVLHQDWLNGKEYKCKVSNKALPAPIEKTISKAKGQPREPQVYTLPPSRDELTKNQVSLTCLVKGFYPSDIAVEWESNGQPENNYKTTPPVLDSDGSFFLYSKLTVDKSRWQQGNVFSCSVMHEALHNHYTQKSLSLSPGKADPSNMDFSRNLYDIGEQLDSEDLASLKFLSLDYIPQRKQEPIKDALMLFQRLQEKRMLEESNLSFLKELLFRINRLDLLITYLNTRKEEMERELQTPGRAQISAYRVMLYQISEEVSRSELRSFKFLLQEEISKCKLDDDMNLLDIFIEMEKRVILGEGKLDILKRVCAQINKSLLKIINDYEEFSKERSSSLEGSPDEFSNGEELCGVMTISDSPREQDSESQTLDKVYQMKSKPRGYCLIINNHNFAKAREKVPKLHSIRDRNGTHLDAGALTTTFEELHFEIKPHDDCTVEQIYEILKIYQLMDHSNMDCFICCILSHGDKGIIYGTDGQEAPIYELTSQFTGLKCPSLAGKPKVFFIQACQGDNYQKGIPVETDSEEQPYLEMDLSSPQTRYIPDEADFLLGMATVNNCVSYRNPAEGTWYIQSLCQSLRERCPRGDDILTILTEVNYEVSNKDDKKNMGKQMPQPTFTLRKKLVFPSD

SEQ ID NO: 477 - DNA, 2178 bp, Artificial sequence
  Description of Artificial Sequence: Synthetic nucleotide sequence
aagcttatggattttcaagtgcagattttcagcttcctgctaatcagtgcttcagtcataatgtccagaggagtcgacattgtgctcacccaatctccagcttctttggctgtgtctctaggtcagagagccaccatctcctgcagagccagtgaaagtgttgaatattatgtcacaagtttaatgcagtggtaccaacagaaaccaggacagccacccaaactcctcatctctgctgcatccaacgtagaatctggggtccctgccaggtttagtggcagtgggtctgggacagacttcagcctcaacatccatcctgtggaggaggatgatattgcaatgtatttctgtcagcaaagtaggaaggttccttggacgttcggtggaggcaccaagctggaaatcaaacggggtggcggtggctcgggcggaggtgggtcgggtggcggcggatctcaggtgcagctgaaggagtcaggacctggcctggtggcgccctcacagagcctgtccatcacatgcaccgtctcagggttctcattaaccggctatggtgtaaactgggttcgccagcctccaggaaagggtctggagtggctgggaatgatatggggtgatggaagcacagactataattcagctctcaaatccagactgagcatcaccaaggacaactccaagagccaagttttcttaaaaatgaacagtctgcaaactgatgacacagccagatactactgtgccagagatggttatagtaactttcattactatgttatggactactggggtcaaggaacctcagtcaccgtctcctcagatctggagcccaaatcttctgacaaaactcacacatccccaccgtccccagcacctgaactcctgggtggaccgtcagtcttcctcttccccccaaaacccaaggacaccctcatgatctcccggacccctgaggtcacatgcgtggtggtggacgtgagccacgaagaccctgaggtcaagttcaactggtacgtggacggcgtggaggtgcataatgccaagacaaagccgcgggaggagcagtacaacagcacgtaccgtgtggtcagcgtcctcaccgtcctgcaccaggactggctgaatggcaaggagtacaagtgcaaggtctccaacaaagccctcccagcccccatcgagaaaaccatctccaaagccaaagggcagccccgagaaccacaggtgtacaccctgcccccatcccgggatgagctgaccaagaaccaggtcagcctgacctgcctggtcaaaggcttctatcccagcgacatcgccgtggagtgggagagcaatgggcagccggagaacaactacaagaccacgcctcccgtgctggactccgacggctccttcttcctctacagcaagctcaccgtggacaagagcaggtggcagcaggggaacgtcttctcatgctccgtgatgcatgaggctctgcacaaccactacacgcagaagagcctctccctgtctccgggtaaagcggatccttcgaacccgttcctggtgctgctgcactcggtgtcgtccagcctgtcgagcagcgagctgaccgagctcaagttcctatgcctcgggcgcgtgggcaagcgcaagctggagcgcgtgcagagcggcctagacctcttctccatgctgctggagcagaacgacctggagcccgggcacaccgagctcctgcgcgagctgctcgcctccctgcggcgccacgacctgctgcggcgcgtcgacgacttcgaggcgggggcggcggccggggccgcgcctggggaagaagacctgtgtgcagcatttaacgtcatatgtgataatgtggggaaagattggagaaggctggctcgtcagctcaaagtctcagacaccaagatcgacagcatcgaggacagatacccccgcaacctgacagagcgtgtgcgggagtcactgagaatctggaagaacacagagaaggagaacgcaacagtggcccacctggtgggggctctcaggtcctgccagatgaacctggtggctgacctggtacaagaggttcagcaggcccgtgacctccagaacaggagtggggccatgtccccgatgtcatggaactcagacgcatctacctccgaagcgtcctgataactcgagatcgataacaac

SEQ ID NO: 478 - protein, 716 aa, Artificial sequence
  Description of Artificial Sequence: Synthetic amino acid sequence
MDFQVQIFSFLLISASVIMSRGVDIVLTQSPASLAVSLGQRATISCRASESVEYYVTSLMQWYQQKPGQPPKLLISAASNVESGVPARFSGSGSGTDFSLNIHPVEEDDIAMYFCQQSRKVPWTFGGGTKLEIKRGGGGSGGGGSGGGGSQVQLKESGPGLVAPSQSLSITCTVSGFSLTGYGVNWVRQPPGKGLEWLGMIWGDGSTDYNSALKSRLSITKDNSKSQVFLKMNSLQTDDTARYYCARDGYSNFHYYVMDYWGQGTSVTVSSDLEPKSSDKTHTSPPSPAPELLGGPSVFLFPPKPKDTLMISRTPEVTCVVVDVSHEDPEVKFNWYVDGVEVHNAKTKPREEQYNSTYRVVSVLTVLHQDWLNGKEYKCKVSNKALPAPIEKTISKAKGQPREPQVYTLPPSRDELTKNQVSLTCLVKGFYPSDIAVEWESNGQPENNYKTTPPVLDSDGSFFLYSKLTVDKSRWQQGNVFSCSVMHEALHNHYTQKSLSLSPGKADPSNPFLVLLHSVSSSLSSSELTELKFLCLGRVGKRKLERVQSGLDLFSMLLEQNDLEPGHTELLRELLASLRRHDLLRRVDDFEAGAAAGAAPGEEDLCAAFNVICDNVGKDWRRLARQLKVSDTKIDSIEDRYPRNLTERVRESLRIWKNTEKENATVAHLVGALRSCQMNLVADLVQEVQQARDLQNRSGAMSPMSWNSDASTSEAS

SEQ ID NO: 479 - DNA, 2178 bp, Artificial sequence
  Description of Artificial Sequence: Synthetic nucleotide sequence
aagcttatggattttcaagtgcagattttcagcttcctgctaatcagtgcttcagtcataatgtccagaggagtcgacattgtgctcacccaatctccagcttctttggctgtgtctctaggtcagagagccaccatctcctgcagagccagtgaaagtgttgaatattatgtcacaagtttaatgcagtggtaccaacagaaaccaggacagccacccaaactcctcatctctgctgcatccaacgtagaatctggggtccctgccaggtttagtggcagtgggtctgggacagacttcagcctcaacatccatcctgtggaggaggatgatattgcaatgtatttctgtcagcaaagtaggaaggttccttggacgttcggtggaggcaccaagctggaaatcaaacggggtggcggtggctcgggcggaggtgggtcgggtggcggcggatctcaggtgcagctgaaggagtcaggacctggcctggtggcgccctcacagagcctgtccatcacatgcaccgtctcagggttctcattaaccggctatggtgtaaactgggttcgccagcctccaggaaagggtctggagtggctgggaatgatatggggtgatggaagcacagactataattcagctctcaaatccagactgagcatcaccaaggacaactccaagagccaagttttcttaaaaatgaacagtctgcaaactgatgacacagccagatactactgtgccagagatggttatagtaactttcattactatgttatggactactggggtcaaggaacctcagtcaccgtctcctcagatctggagcccaaatcttctgacaaaactcacacatccccaccgtccccagcacctgaactcctgggtggatcgtcagtcttcctcttccccccaaaacccaaggacaccctcatgatctcccggacccctgaggtcacatgcgtggtggtggacgtgagccacgaagaccctgaggtcaagttcaactggtacgtggacggcgtggaggtgcataatgccaagacaaagccgcgggaggagcagtacaacagcacgtaccgtgtggtcagcgtcctcaccgtcctgcaccaggactggctgaatggcaaggagtacaagtgcaaggtctccaacaaagccctcccagcccccatcgagaaaaccatctccaaagccaaagggcagccccgagaaccacaggtgtacaccctgcccccatcccgggatgagctgaccaagaaccaggtcagcctgacctgcctggtcaaaggcttctatcccagcgacatcgccgtggagtgggagagcaatgggcagccggagaacaactacaagaccacgcctcccgtgctggactccgacggctccttcttcctctacagcaagctcaccgtggacaagagcaggtggcagcaggggaacgtcttctcatgctccgtgatgcatgaggctctgcacaaccactacacgcagaagagcctctccctgtctccgggtaaagcggatccttcgaacccgttcctggtgctgctgcactcggtgtcgtccagcctgtcgagcagcgagctgaccgagctcaagttcctatgcctcgggcgcgtgggcaagcgcaagctggagcgcgtgcagagcggcctagacctcttctccatgctgctggagcagaacgacctggagcccgggcacaccgagctcctgcgcgagctgctcgcctccctgcggcgccacgacctgctgcggcgcgtcgacgacttcgaggcgggggcggcggccggggccgcgcctggggaagaagacctgtgtgcagcatttaacgtcatatgtgataatgtggggaaagattggagaaggctggctcgtcagctcaaagtctcagacaccaagatcgacagcatcgaggacagatacccccgcaacctgacagagcgtgtgcgggagtcactgagaatctggaagaacacagagaaggagaacgcaacagtggcccacctggtgggggctctcaggtcctgccagatgaacctggtggctgacctggtacaagaggttcagcaggcccgtgacctccagaacaggagtggggccatgtccccgatgtcatggaactcagacgcatctacctccgaagcgtcctgataactcgagatcgataacaac

SEQ ID NO: 480 - protein, 716 aa, Artificial sequence
  Description of Artificial Sequence: Synthetic amino acid sequence
MDFQVQIFSFLLISASVIMSRGVDIVLTQSPASLAVSLGQRATISCRASESVEYYVTSLMQWYQQKPGQPPKLLISAASNVESGVPARFSGSGSGTDFSLNIHPVEEDDIAMYFCQQSRKVPWTFGGGTKLEIKRGGGGSGGGGSGGGGSQVQLKESGPGLVAPSQSLSITCTVSGFSLTGYGVNWVRQPPGKGLEWLGMIWGDGSTDYNSALKSRLSITKDNSKSQVFLKMNSLQTDDTARYYCARDGYSNFHYYVMDYWGQGTSVTVSSDLEPKSSDKTHTSPPSPAPELLGGSSVFLFPPKPKDTLMISRTPEVTCVVVDVSHEDPEVKFNWYVDGVEVHNAKTKPREEQYNSTYRVVSVLTVLHQDWLNGKEYKCKVSNKALPAPIEKTISKAKGQPREPQVYTLPPSRDELTKNQVSLTCLVKGFYPSDIAVEWESNGQPENNYKTTPPVLDSDGSFFLYSKLTVDKSRWQQGNVFSCSVMHEALHNHYTQKSLSLSPGKADPSNPFLVLLHSVSSSLSSSELTELKFLCLGRVGKRKLERVQSGLDLFSMLLEQNDLEPGHTELLRELLASLRRHDLLRRVDDFEAGAAAGAAPGEEDLCAAFNVICDNVGKDWRRLARQLKVSDTKIDSIEDRYPRNLTERVRESLRIWKNTEKENATVAHLVGALRSCQMNLVADLVQEVQQARDLQNRSGAMSPMSWNSDASTSEAS

SEQ ID NO: 481 - DNA, 2004 bp, Artificial sequence
  Description of Artificial Sequence: Synthetic nucleotide sequence
aagcttatggattttcaagtgcagattttcagcttcctgctaatcagtgcttcagtcataatgtccagaggagtcgacattgtgctcacccaatctccagcttctttggctgtgtctctaggtcagagagccaccatctcctgcagagccagtgaaagtgttgaatattatgtcacaagtttaatgcagtggtaccaacagaaaccaggacagccacccaaactcctcatctctgctgcatccaacgtagaatctggggtccctgccaggtttagtggcagtgggtctgggacagacttcagcctcaacatccatcctgtggaggaggatgatattgcaatgtatttctgtcagcaaagtaagcttatggattttcaagtgcagattttcagcttcctgctaatcagtgcttcagtcataatgtccagaggagtcgacattgtgctcactcagtctccaacaaccatagctgcatctccaggggagaaggtcaccatcacctgccgtgccagctccagtgtaagttacatgtactggtaccagcagaagtcaggcgcctcccctaaactctggatttatgacacatccaagctggcttctggagttccaaatcgcttcagtggcagtgggtctgggacctcttattctctcgcaatcaacaccatggagactgaagatgctgccacttattactgtcagcagtggagtagtactccgctcacgttcgggtctgggaccaagctggagatcaaacggggtggcggtggctcgggcggtggtgggtcgggtggcggcggatctcaggtgcagctgaaggaggcaggacctggcctggtgcaaccgacacagaccctgtccctcacatgcactgtctctgggttctcattaaccagcgatggtgtacactggattcgacagcctccaggaaagggtctggaatggatgggaataatatattatgatggaggcacagattataattcagcaattaaatccagactgagcatcagcagggacacctccaagagccaagttttcttaaaaatcaacagtctgcaaactgatgacacagccatgtattactgtgccagaatccactttgattactggggccaaggagtcatggtcacagtctcctctgatctggagcccaaatcttctgacaaaactcacacatccccaccgtccccagcacctgaactcctggggggaccgtcagtcttcctcttccccccaaaacccaaggacaccctcatgatctcccggacccctgaggtcacatgcgtggtggtggacgtgagccacgaagaccctgaggtcaagttcaactggtacgtggacggcgtggaggtgcataatgccaagacaaagccgcgggaggagcagtacaacagcacgtaccgtgtggtcagcgtcctcaccgtcctgcaccaggactggctgaatggcaaggagtacaagtgcaaggtctccaacaaagccctcccagcccccatcgagaaaaccatctccaaagccaaagggcagccccgagaaccacaggtgtacaccctgcccccatcccgggatgagctgaccaagaaccaggtcagcctgacctgcctggtcaaaggcttctatcccagcgacatcgccgtggagtgggagagcaatgggcagccggagaacaactacaagaccacgcctcccgtgctggactccgacggctccttcttcctctacagcaagctcaccgtggacaagagcaggtggcagcaggggaacgtcttctcatgctccgtgatgcatgaggctctgcacaaccactacacgcagaagagcctctccctgtctccgggtaaagcggatccttcgaacctgctcccatcctgggccattaccttaatctcagtaaatggaatttttgtgatatgctgcctgacctactgctttgccccaagatgcagagagagaaggaggaatgagagattgagaagggaaagtgtacgccctgtataaatcgat

SEQ ID NO: 482 - protein, 663 aa, Artificial sequence
  Description of Artificial Sequence: Synthetic amino acid sequence
MDFQVQIFSFLLISASVIMSRGVDIVLTQSPASLAVSLGQRATISCRASESVEYYVTSLMQWYQQKPGQPPKLLISAASNVESGVPARFSGSGSGTDFSLNIHPVEEDDIAMYFCQQSKLMDFQVQIFSFLLISASVIMSRGVDIVLTQSPTTIAASPGEKVTITCRASSSVSYMYWYQQKSGASPKLWIYDTSKLASGVPNRFSGSGSGTSYSLAINTMETEDAATYYCQQWSSTPLTFGSGTKLEIKRGGGGSGGGGSGGGGSQVQLKEAGPGLVQPTQTLSLTCTVSGFSLTSDGVHWIRQPPGKGLEWMGIIYYDGGTDYNSAIKSRLSISRDTSKSQVFLKINSLQTDDTAMYYCARIHFDYWGQGVMVTVSSDLEPKSSDKTHTSPPSPAPELLGGPSVFLFPPKPKDTLMISRTPEVTCVVVDVSHEDPEVKFNWYVDGVEVHNAKTKPREEQYNSTYRVVSVLTVLHQDWLNGKEYKCKVSNKALPAPIEKTISKAKGQPREPQVYTLPPSRDELTKNQVSLTCLVKGFYPSDIAVEWESNGQPENNYKTTPPVLDSDGSFFLYSKLTVDKSRWQQGNVFSCSVMHEALHNHYTQKSLSLSPGKADPSNLLPSWAITLISVNGIFVICCLTYCFAPRCRERRRNERLRRESVRPV

SEQ ID NO: 483 - DNA, 1668 bp, Artificial sequence
  Description of Artificial Sequence: Synthetic nucleotide sequence
aagcttatggattttcaagtgcagattttcagcttcctgctaatcagtgcttcagtcataatgtccagaggagtcgacattgtgctcactcagtctccaacaaccatagctgcatctccaggggagaaggtcaccatcacctgccgtgccagctccagtgtaagttacatgtactggtaccagcagaagtcaggcgcctcccctaaactctggatttatgacacatccaagctggcttctggagttccaaatcgcttcagtggcagtgggtctgggacctcttattctctcgcaatcaacaccatggagactgaagatgctgccacttattactgtcagcagtggagtagtactccgctcacgttcgggtctgggaccaagctggagatcaaacggggtggcggtggctcgggcggtggtgggtcgggtggcggcggatctcaggtgcagctgaaggaggcaggacctggcctggtgcaaccgacacagaccctgtccctcacatgcactgtctctgggttctcattaaccagcgatggtgtacactggattcgacagcctccaggaaagggtctggaatggatgggaataatatattatgatggaggcacagattataattcagcaattaaatccagactgagcatcagcagggacacctccaagagccaagttttcttaaaaatcaacagtctgcaaactgatgacacagccatgtattactgtgccagaatccactttgattactggggccaaggagtcatggtcacagtctcctctgatcacatctgttctcctcctactactcctcctccaccttcctgccagcccagcctgtcactgcagcggccagctcttgaggacctgctcctgggttcagatgccagcatcacatgtactctgaatggcctgagagatcctgagggagctgtcttcacctgggagccctccactgggaaggatgcagtgcagaagaaagctgtgcagaattcctgcggctgctacagtgtgtccagcgtcctgcctggctgtgctgagcgctggaacagtggcgcatcattcaagtgcacagttacccatcctgagtctgacaccttaactggcacaattgccaaagtcacagtgaacaccttcccaccccaggtccacctgctaccgccgccgtcggaggagctggccctgaatgagctcgtgtccctgacatgcctggtgcgagctttcaaccctaaagaagtgctggtgcgatggctgcatggaaatgaggagctgtccccagaaagctacctagtgtttgagcccctaaaggagccaggcgagggagccaccacctacctggtgacaagcgtgttgcgtgtatcagctgaaatctggaaacagggtgaccagtactcctgcatggtgggccacgaggccttgcccatgaacttcacccagaagaccatcgaccgtctgtcgggtaaacccaccaatgtcagcgtgtctgtgatcatgtcagagggagaggatccttcgaacaacctgctcccatcctgggccattaccttaatctcagtaaatggaatttttgtgatatgctgcctgacctactgctttgccccaagatgcagagagagaaggaggaatgagagattgagaagggaaagtgtacgccctgtataaatcgatact

SEQ ID NO: 484 - protein, 550 aa, Artificial sequence
  Description of Artificial Sequence: Synthetic amino acid sequence
MDFQVQIFSFLLISASVIMSRGVDIVLTQSPTTIAASPGEKVTITCRASSSVSYMYWYQQKSGASPKLWIYDTSKLASGVPNRFSGSGSGTSYSLAINTMETEDAATYYCQQWSSTPLTFGSGTKLEIKRGGGGSGGGGSGGGGSQVQLKEAGPGLVQPTQTLSLTCTVSGFSLTSDGVHWIRQPPGKGLEWMGIIYYDGGTDYNSAIKSRLSISRDTSKSQVFLKINSLQTDDTAMYYCARIHFDYWGQGVMVTVSSDHICSPPTTPPPPSCQPSLSLQRPALEDLLLGSDASITCTLNGLRDPEGAVFTWEPSTGKDAVQKKAVQNSCGCYSVSSVLPGCAERWNSGASFKCTVTHPESDTLTGTIAKVTVNTFPPQVHLLPPPSEELALNELVSLTCLVRAFNPKEVLVRWLHGNEELSPESYLVFEPLKEPGEGATTYLVTSVLRVSAEIWKQGDQYSCMVGHEALPMNFTQKTIDRLSGKPTNVSVSVIMSEGEDPSNNLLPSWAITLISVNGIFVICCLTYCFAPRCRERRRNERLRRESVRPV

SEQ ID NO: 485 - DNA, 2127 bp, Artificial sequence
  Description of Artificial Sequence: Synthetic nucleotide sequence
aagcttatggattttcaagtgcagattttcagcttcctgctaatcagtgcttcagtcataatgtccagaggagtcgacattgtgctcactcagtctccaacaaccatagctgcatctccaggggagaaggtcaccatcacctgccgtgccagctccagtgtaagttacatgtactggtaccagcagaagtcaggcgcctcccctaaactctggatttatgacacatccaagctggcttctggagttccaaatcgcttcagtggcagtgggtctgggacctcttattctctcgcaatcaacaccatggagactgaagatgctgccacttattactgtcagcagtggagtagtactccgctcacgttcgggtctgggaccaagctggagatcaaacggggtggcggtggctcgggcggtggtgggtcgggtggcggcggatctcaggtgcagctgaaggaggcaggacctggcctggtgcaaccgacacagaccctgtccctcacatgcactgtctctgggttctcattaaccagcgatggtgtacactggattcgacagcctccaggaaagggtctggaatggatgggaataatatattatgatggaggcacagattataattcagcaattaaatccagactgagcatcagcagggacacctccaagagccaagttttcttaaaaatcaacagtctgcaaactgatgacacagccatgtattactgtgccagaatccactttgattactggggccaaggagtcatggtcacagtctcctctgatctggagcccaaatcttctgacaaaactcacacatccccaccgtccccagcacctgaactcctgggtggaccgtcagtcttcctcttccccccaaaacccaaggacaccctcatgatctcccggacccctgaggtcacatgcgtggtggtggacgtgagccacgaagaccctgaggtcaagttcaactggtacgtggacggcgtggaggtgcataatgccaagacaaagccgcgggaggagcagtacaacagcacgtaccgtgtggtcagcgtcctcaccgtcctgcaccaggactggctgaatggcaaggagtacaagtgcaaggtctccaacaaagccctcccagcccccatcgagaaaaccatctccaaagccaaagggcagccccgagaaccacaggtgtacaccctgcccccatcccgggatgagctgaccaagaaccaggtcagcctgacctgcctggtcaaaggcttctatcccagcgacatcgccgtggagtgggagagcaatgggcagccggagaacaactacaagaccacgcctcccgtgctggactccgacggctccttcttcctctacagcaagctcaccgtggacaagagcaggtggcagcaggggaacgtcttctcatgctccgtgatgcatgaggctctgcacaaccactacacgcagaagagcctctccctgtctccgggtaaagcggatccttcgaacatggacccattcctggtgctgctgcactcgctgtccggcagcctgtcgggcaacgatctgatggagctcaagttcttgtgccgcgagcgcgtgagcaaacgaaagctggagcgcgtgcagagtggcctggacctgttcacggtgctgctggagcagaacgacctggagcgcgggcacaccgggctgctgcgcgagttgctggcctcgctgcgccgacacgatctactgcagcgcctggacgacttcgaggcggggacggcgaccgctgcgcccccgggggaggcagatctgcaggtggcatttgacattgtgtgtgacaatgtggggagagactggaaaagactggcccgcgagctgaaggtgtctgaggccaagatggatgggattgaggagaagtacccccgaagtctgagtgagcgggtaagggagagtctgaaagtctggaagaatgctgagaagaagaacgcctcggtggccggactggtcaaggcgctgcggacctgcaggctgaatctggtggctgacctggtggaagaagcccaggaatctgtgagcaagagtgagaatatgtccccagtactaagggattcaactgtgtcttcctcagaaacaccctgactcgagatcgat

SEQ ID NO: 486 - protein, 702 aa, Artificial sequence
  Description of Artificial Sequence: Synthetic amino acid sequence
MDFQVQIFSFLLISASVIMSRGVDIVLTQSPTTIAASPGEKVTITCRASSSVSYMYWYQQKSGASPKLWIYDTSKLASGVPNRFSGSGSGTSYSLAINTMETEDAATYYCQQWSSTPLTFGSGTKLEIKRGGGGSGGGGSGGGGSQVQLKEAGPGLVQPTQTLSLTCTVSGFSLTSDGVHWIRQPPGKGLEWMGIIYYDGGTDYNSAIKSRLSISRDTSKSQVFLKINSLQTDDTAMYYCARIHFDYWGQGVMVTVSSDLEPKSSDKTHTSPPSPAPELLGGPSVFLFPPKPKDTLMISRTPEVTCVVVDVSHEDPEVKFNWYVDGVEVHNAKTKPREEQYNSTYRVVSVLTVLHQDWLNGKEYKCKVSNKALPAPIEKTISKAKGQPREPQVYTLPPSRDELTKNQVSLTCLVKGFYPSDIAVEWESNGQPENNYKTTPPVLDSDGSFFLYSKLTVDKSRWQQGNVFSCSVMHEALHNHYTQKSLSLSPGKADPSNMDPFLVLLHSLSGSLSGNDLMELKFLCRERVSKRKLERVQSGLDLFTVLLEQNDLERGHTGLLRELLASLRRHDLLQRLDDFEAGTATAAPPGEADLQVAFDIVCDNVGRDWKRLARELKVSEAKMDGIEEKYPRSLSERVRESLKVWKNAEKKNASVAGLVKALRTCRLNLVADLVEEAQESVSKSENMSPVLRDSTVSSSETP

SEQ ID NO: 487 - DNA, 2127 bp, Artificial sequence
  Description of Artificial Sequence: Synthetic nucleotide sequence
aagcttatggattttcaagtgcagattttcagcttcctgctaatcagtgcttcagtcataatgtccagaggagtcgacattgtgctcactcagtctccaacaaccatagctgcatctccaggggagaaggtcaccatcacctgccgtgccagctccagtgtaagttacatgtactggtaccagcagaagtcaggcgcctcccctaaactctggatttatgacacatccaagctggcttctggagttccaaatcgcttcagtggcagtgggtctgggacctcttattctctcgcaatcaacaccatggagactgaagatgctgccacttattactgtcagcagtggagtagtactccgctcacgttcgggtctgggaccaagctggagatcaaacggggtggcggtggctcgggcggtggtgggtcgggtggcggcggatctcaggtgcagctgaaggaggcaggacctggcctggtgcaaccgacacagaccctgtccctcacatgcactgtctctgggttctcattaaccagcgatggtgtacactggattcgacagcctccaggaaagggtctggaatggatgggaataatatattatgatggaggcacagattataattcagcaattaaatccagactgagcatcagcagggacacctccaagagccaagttttcttaaaaatcaacagtctgcaaactgatgacacagccatgtattactgtgccagaatccactttgattactggggccaaggagtcatggtcacagtctcctctgatctggagcccaaatcttctgacaaaactcacacatccccaccgtccccagcacctgaactcctgggtggatcgtcagtcttcctcttccccccaaaacccaaggacaccctcatgatctcccggacccctgaggtcacatgcgtggtggtggacgtgagccacgaagaccctgaggtcaagttcaactggtacgtggacggcgtggaggtgcataatgccaagacaaagccgcgggaggagcagtacaacagcacgtaccgtgtggtcagcgtcctcaccgtcctgcaccaggactggctgaatggcaaggagtacaagtgcaaggtctccaacaaagccctcccagcccccatcgagaaaaccatctccaaagccaaagggcagccccgagaaccacaggtgtacaccctgcccccatcccgggatgagctgaccaagaaccaggtcagcctgacctgcctggtcaaaggcttctatcccagcgacatcgccgtggagtgggagagcaatgggcagccggagaacaactacaagaccacgcctcccgtgctggactccgacggctccttcttcctctacagcaagctcaccgtggacaagagcaggtggcagcaggggaacgtcttctcatgctccgtgatgcatgaggctctgcacaaccactacacgcagaagagcctctccctgtctccgggtaaagcggatccttcgaacatggacccattcctggtgctgctgcactcgctgtccggcagcctgtcgggcaacgatctgatggagctcaagttcttgtgccgcgagcgcgtgagcaaacgaaagctggagcgcgtgcagagtggcctggacctgttcacggtgctgctggagcagaacgacctggagcgcgggcacaccgggctgctgcgcgagttgctggcctcgctgcgccgacacgatctactgcagcgcctggacgacttcgaggcggggacggcgaccgctgcgcccccgggggaggcagatctgcaggtggcatttgacattgtgtgtgacaatgtggggagagactggaaaagactggcccgcgagctgaaggtgtctgaggccaagatggatgggattgaggagaagtacccccgaagtctgagtgagcgggtaagggagagtctgaaagtctggaagaatgctgagaagaagaacgcctcggtggccggactggtcaaggcgctgcggacctgcaggctgaatctggtggctgacctggtggaagaagcccaggaatctgtgagcaagagtgagaatatgtccccagtactaagggattcaactgtgtcttcctcagaaacaccctgactcgagatcgat

SEQ ID NO: 488 - protein, 702 aa, Artificial sequence
  Description of Artificial Sequence: Synthetic amino acid sequence
MDFQVQIFSFLLISASVIMSRGVDIVLTQSPTTIAASPGEKVTITCRASSSVSYMYWYQQKSGASPKLWIYDTSKLASGVPNRFSGSGSGTSYSLAINTMETEDAATYYCQQWSSTPLTFGSGTKLEIKRGGGGSGGGGSGGGGSQVQLKEAGPGLVQPTQTLSLTCTVSGFSLTSDGVHWIRQPPGKGLEWMGIIYYDGGTDYNSAIKSRLSISRDTSKSQVFLKINSLQTDDTAMYYCARIHFDYWGQGVMVTVSSDLEPKSSDKTHTSPPSPAPELLGGSSVFLFPPKPKDTLMISRTPEVTCVVVDVSHEDPEVKFNWYVDGVEVHNAKTKPREEQYNSTYRVVSVLTVLHQDWLNGKEYKCKVSNKALPAPIEKTISKAKGQPREPQVYTLPPSRDELTKNQVSLTCLVKGFYPSDIAVEWESNGQPENNYKTTPPVLDSDGSFFLYSKLTVDKSRWQQGNVFSCSVMHEALHNHYTQKSLSLSPGKADPSNMDPFLVLLHSLSGSLSGNDLMELKFLCRERVSKRKLERVQSGLDLFTVLLEQNDLERGHTGLLRELLASLRRHDLLQRLDDFEAGTATAAPPGEADLQVAFDIVCDNVGRDWKRLARELKVSEAKMDGIEEKYPRSLSERVRESLKVWKNAEKKNASVAGLVKALRTCRLNLVADLVEEAQESVSKSENMSPVLRDSTVSSSETP

SEQ ID NO: 489 - DNA, 2344 bp, Artificial sequence
  Description of Artificial Sequence: Synthetic nucleotide sequence
aagcttatggattttcaagtgcagattttcagcttcctgctaatcagtgcttcagtcataatgtccagaggagtcgacattgtgctcactcagtctccaacaaccatagctgcatctccaggggagaaggtcaccatcacctgccgtgccagctccagtgtaagttacatgtactggtaccagcagaagtcaggcgcctcccctaaactctggatttatgacacatccaagctggcttctggagttccaaatcgcttcagtggcagtgggtctgggacctcttattctctcgcaatcaacaccatggagactgaagatgctgccacttattactgtcagcagtggagtagtactccgctcacgttcgggtctgggaccaagctggagatcaaacggggtggcggtggctcgggcggtggtgggtcgggtggcggcggatctcaggtgcagctgaaggaggcaggacctggcctggtgcaaccgacacagaccctgtccctcacatgcactgtctctgggttctcattaaccagcgatggtgtacactggattcgacagcctccaggaaagggtctggaatggatgggaataatatattatgatggaggcacagattataattcagcaattaaatccagactgagcatcagcagggacacctccaagagccaagttttcttaaaaatcaacagtctgcaaactgatgacacagccatgtattactgtgccagaatccactttgattactggggccaaggagtcatggtcacagtctcctctgatctggagcccaaatcttctgacaaaactcacacatccccaccgtccccagcacctgaactcctgggtggaccgtcagtcttcctcttccccccaaaacccaaggacaccctcatgatctcccggacccctgaggtcacatgcgtggtggtggacgtgagccacgaagaccctgaggtcaagttcaactggtacgtggacggcgtggaggtgcataatgccaagacaaagccgcgggaggagcagtacaacagcacgtaccgtgtggtcagcgtcctcaccgtcctgcaccaggactggctgaatggcaaggagtacaagtgcaaggtctccaacaaagccctcccagcccccatcgagaaaaccatctccaaagccaaagggcagccccgagaaccacaggtgtacaccctgcccccatcccgggatgagctgaccaagaaccaggtcagcctgacctgcctggtcaaaggcttctatcccagcgacatcgccgtggagtgggagagcaatgggcagccggagaacaactacaagaccacgcctcccgtgctggactccgacggctccttcttcctctacagcaagctcaccgtggacaagagcaggtggcagcaggggaacgtcttctcatgctccgtgatgcatgaggctctgcacaaccactacacgcagaagagcctctccctgtctccgggtaaagcggatccttcgaacatggagaacaacaaaacctcagtggattcaaaatccattaataattttgaagtaaagaccatacatgggagcaagtcagtggactctgggatctatctggacagtagttacaaaatggattatcctgaaatgggcatatgcataataattaataataagaacttccataagagcactggaatgtcatctcgctctggtacggatgtggacgcagccaacctcagagagacattcatgggcctgaaataccaagtcaggaataaaaatgatcttactcgtgaagacattttggaattaatggatagtgtttctaaggaagatcatagcaaaaggagcagctttgtgtgtgtgattctaagccatggtgatgaaggggtcatttatgggacaaatgggcctgttgaactgaaaaagttgactagcttcttcagaggcgactactgccggagtctgactggaaagccgaaactcttcatcattcaggcctgccggggtacggagctggactgtggcattgagacagacagtgggactgatgaggagatggcttgccagaagataccggtggaggctgacttcctgtatgcttactctacagcacctggttactattcctggagaaattcaaaggacgggtcgtggttcatccagtccctttgcagcatgctgaagctgtacgcgcacaagctagaatttatgcacattctcactcgcgttaacaggaaggtggcaacggaattcgagtccttctccctggactccactttccacgcaaagaaacagatcccgtgtattgtgtccatgctcacgaaagaactgtacttttatcactagctcgagatcgatg

SEQ ID NO: 490 - protein, 774 aa, Artificial sequence
  Description of Artificial Sequence: Synthetic amino acid sequence
MDFQVQIFSFLLISASVIMSRGVDIVLTQSPTTIAASPGEKVTITCRASSSVSYMYWYQQKSGASPKLWIYDTSKLASGVPNRFSGSGSGTSYSLAINTMETEDAATYYCQQWSSTPLTFGSGTKLEIKRGGGGSGGGGSGGGGSQVQLKEAGPGLVQPTQTLSLTCTVSGFSLTSDGVHWIRQPPGKGLEWMGIIYYDGGTDYNSAIKSRLSISRDTSKSQVFLKINSLQTDDTAMYYCARIHFDYWGQGVMVTVSSDLEPKSSDKTHTSPPSPAPELLGGPSVFLFPPKPKDTLMISRTPEVTCVVVDVSHEDPEVKFNWYVDGVEVHNAKTKPREEQYNSTYRVVSVLTVLHQDWLNGKEYKCKVSNKALPAPIEKTISKAKGQPREPQVYTLPPSRDELTKNQVSLTCLVKGFYPSDIAVEWESNGQPENNYKTTPPVLDSDGSFFLYSKLTVDKSRWQQGNVFSCSVMHEALHNHYTQKSLSLSPGKADPSNMENNKTSVDSKSINNFEVKTIHGSKSVDSGIYLDSSYKMDYPEMGICIIINNKNFHKSTGMSSRSGTDVDAANLRETFMGLKYQVRNKNDLTREDILELMDSVSKEDHSKRSSFVCVILSHGDEGVIYGTNGPVELKKLTSFFRGDYCRSLTGKPKLFIIQACRGTELDCGIETDSGTDEEMACQKIPVEADFLYAYSTAPGYYSWRNSKDGSWFIQSLCSMLKLYAHKLEFMHILTRVNRKVATEFESFSLDSTFHAKKQIPCIVSMLTKELYFYH

SEQ ID NO: 491 - DNA, 782 bp, Artificial sequence
  Description of Artificial Sequence: Synthetic nucleotide sequence
aagcttatggattttcaagtgcagattttcagcttcctgctaatcagtgcttcagtcataatgtccagaggagtcgacattgtgctcactcagtctccaacaaccatagctgcatctccaggggagaaggtcaccatcacctgccgtgccagctccagtgtaagttacatgtactggtaccagcagaagtcaggcgcctcccctaaactctggatttatgacacatccaagctggcttctggagttccaaatcgcttcagtggcagtgggtctgggacctcttattctctcgcaatcaacaccatggagactgaagatgctgccacttattactgtcagcagtggagtagtactccgctcacgttcgggtctgggaccaagctggagatcaaacggggtggcggtggctcgggcggtggtgggtcgggtggcggcggatctcaggtgcagctgaaggaggcaggacctggcctggtgcaaccgacacagaccctgtccctcacatgcactgtctctgggttctcattaaccagcgatggtgtacactggattcgacagcctccaggaaagggtctggaatggatgggaataatatattatgatggaggcacagattataattcagcaattaaatccagactgagcatcagcagggacacctccaagagccaagttttcttaaaaatcaacagtctgcaaactgatgacacagccatgtattactgtgccagaatccactttgattactggggccaaggagtcatggtcacagtctcctctga

SEQ ID NO: 492 - protein, 776 aa, Artificial sequence
  Description of Artificial Sequence: Synthetic amino acid sequence
MDFQVQIFSFLLISASVIMSRGVDIVLTQSPTTIAASPGEKVTITCRASSSVSYMYWYQQKSGASPKLWIYDTSKLASGVPNRFSGSGSGTSYSLAINTMETEDAATYYCQQWSSTPLTFGSGTKLEIKRGGGGSGGGGSGGGGSQVQLKEAGPGLVQPTQTLSLTCTVSGFSLTSDGVHWIRQPPGKGLEWMGIIYYDGGTDYNSAIKSRLSISRDTSKSQVFLKINSLQTDDTAMYYCARIHFDYWGQGVMVTVSSDLEPKSSDKTHTSPPSPAPELLGGSSVFLFPPKPKDTLMISRTPEVTCVVVDVSHEDPEVKFNWYVDGVEVHNAKTKPREEQYNSTYRVVSVLTVLHQDWLNGKEYKCKVSNKALPAPIEKTISKAKGQPREPQVYTLPPSRDELTKNQVSLTCLVKGFYPSDIAVEWESNGQPENNYKTTPPVLDSDGSFFLYSKLTVDKSRWQQGNVFSCSVMHEALHNHYTQKSLSLSPGKADPSNSNMENNKTSVDSKSINNFEVKTIHGSKSVDSGIYLDSSYKMDYPEMGICIIINNKNFHKSTGMSSRSGTDVDAANLRETFMGLKYQVRNKNDLTREDILELMDSVSKEDHSKRSSFVCVILSHGDEGVIYGTNGPVELKKLTSFFRGDYCRSLTGKPKLFIIQACRGTELDCGIETDSGTDEEMACQKIPVEADFLYAYSTAPGYYSWRNSKDGSWFIQSLCSMLKLYAHKLEFMHILTRVNRKVATEFESFSLDSTFHAKKQIPCIVSMLTKELYFYH

SEQ ID NO: 493 - DNA, 2956 bp, Artificial sequence
  Description of Artificial Sequence: Synthetic nucleotide sequence
aagcttatggattttcaagtgcagattttcagcttcctgctaatcagtgcttcagtcataatgtccagaggagtcgacattgtgctcactcagtctccaacaaccatagctgcatctccaggggagaaggtcaccatcacctgccgtgccagctccagtgtaagttacatgtactggtaccagcagaagtcaggcgcctcccctaaactctggatttatgacacatccaagctggcttctggagttccaaatcgcttcagtggcagtgggtctgggacctcttattctctcgcaatcaacaccatggagactgaagatgctgccacttattactgtcagcagtggagtagtactccgctcacgttcgggtctgggaccaagctggagatcaaacggggtggcggtggctcgggcggtggtgggtcgggtggcggcggatctcaggtgcagctgaaggaggcaggacctggcctggtgcaaccgacacagaccctgtccctcacatgcactgtctctgggttctcattaaccagcgatggtgtacactggattcgacagcctccaggaaagggtctggaatggatgggaataatatattatgatggaggcacagattataattcagcaattaaatccagactgagcatcagcagggacacctccaagagccaagttttcttaaaaatcaacagtctgcaaactgatgacacagccatgtattactgtgccagaatccactttgattactggggccaaggagtcatggtcacagtctcctctgatctggagcccaaatcttctgacaaaactcacacatccccaccgtccccagcacctgaactcctgggtggaccgtcagtcttcctcttccccccaaaacccaaggacaccctcatgatctcccggacccctgaggtcacatgcgtggtggtggacgtgagccacgaagaccctgaggtcaagttcaactggtacgtggacggcgtggaggtgcataatgccaagacaaagccgcgggaggagcagtacaacagcacgtaccgtgtggtcagcgtcctcaccgtcctgcaccaggactggctgaatggcaaggagtacaagtgcaaggtctccaacaaagccctcccagcccccatcgagaaaaccatctccaaagccaaagggcagccccgagaaccacaggtgtacaccctgcccccatcccgggatgagctgaccaagaaccaggtcagcctgacctgcctggtcaaaggcttctatcccagcgacatcgccgtggagtgggagagcaatgggcagccggagaacaactacaagaccacgcctcccgtgctggactccgacggctccttcttcctctacagcaagctcaccgtggacaagagcaggtggcagcaggggaacgtcttctcatgctccgtgatgcatgaggctctgcacaaccactacacgcagaagagcctctccctgtctccgggtaaagcggatccttcgaacatggatttccagagttgtctttatgctattgctgaagaactgggcagtgaagacctggctgccctcaagttcctgtgcttggactacatcccacacaagaagcaggagaccatcgaggatgcccagaagctatttctgaggctgcgggaaaaggggatgttggaggaaggcaatctgtctttcctgaaagagctgcttttccacatcagtcggtgggacctgctggtcaacttcctagactgcaaccgagaggagatggtgagagagctgcgggatccagacaatgcccagatttctccctacagggtcatgctctttaagctctcagaagaagtgagcgagttggaattgagatcttttaagttccttttgaacaatgagatccccaaatgtaagctggaagatgacttgagcctgcttgaaatttttgtagaaatggagaagaggaccatgctggcagaaaataacttggaaaccctaaaatcaatctgtgaccaggtcaacaagagcctgctggggaagatcgaggattatgaaagatcaagcacagagagaagaatgagccttgaaggaagggaagagttgccaccttcagttttggatgagatgagcctcaaaatggcggaactgtgtgactcgccaagagaacaagacagtgagtcacggacttcagacaaagtttaccaaatgaagaacaaacctcggggatactgtctgatcatcaacaatcatgatttcagcaaggcccgggaagacataacccaactccgaaaaatgaaggacagaaaaggaacagactgtgataaagaggctctgagtaagacctttaaggagcttcattttgagatagtatcttacgacgactgcactgcaaatgaaatccacgagattctagaaggctaccaaagcgcagaccacaagaacaaagactgcttcatctgctgtatcctatcccacggtgacaagggtgtcgtctatggaacggatgggaaggaggcctccatctatgacctgacatcttacttcactggttcaaagtgcccttccctgtctgggaaacccaagatctttttcattcaggcttgccaaggaagtaacttccagaaaggagtgcctgatgaggcaggcttcgagcaacagaaccacactttagaagtggattcatcatctcacaagaactatattccggatgaggcagactttctgctgggaatggctacggtgaagaactgcgtttcctaccgagatcctgtgaatggaacctggtatattcagtcactttgccagagcctgagggaaagatgtcctcaaggagatgacattcttagcatcctgactggcgtgaactatgacgtgagcaataaagacgacaggaggaacaagggaaagcagatgccacagcccaccttcacactacggaagaagctcttcttccctccctaatgactcgagatcgatt

SEQ ID NO: 494 - protein, 977 aa, Artificial sequence
  Description of Artificial Sequence: Synthetic amino acid sequence
MDFQVQIFSFLLISASVIMSRGVDIVLTQSPTTIAASPGEKVTITCRASSSVSYMYWYQQKSGASPKLWIYDTSKLASGVPNRFSGSGSGTSYSLAINTMETEDAATYYCQQWSSTPLTFGSGTKLEIKRGGGGSGGGGSGGGGSQVQLKEAGPGLVQPTQTLSLTCTVSGFSLTSDGVHWIRQPPGKGLEWMGIIYYDGGTDYNSAIKSRLSISRDTSKSQVFLKINSLQTDDTAMYYCARIHFDYWGQGVMVTVSSDLEPKSSDKTHTSPPSPAPELLGGPSVFLFPPKPKDTLMISRTPEVTCVVVDVSHEDPEVKFNWYVDGVEVHNAKTKPREEQYNSTYRVVSVLTVLHQDWLNGKEYKCKVSNKALPAPIEKTISKAKGQPREPQVYTLPPSRDELTKNQVSLTCLVKGFYPSDIAVEWESNGQPENNYKTTPPVLDSDGSFFLYSKLTVDKSRWQQGNVFSCSVMHEALHNHYTQKSLSLSPGKADPSNMDFQSCLYAIAEELGSEDLAALKFLCLDYIPHKKQETIEDAQKLFLRLREKGMLEEGNLSFLKELLFHISRWDLLVNFLDCNREEMVRELRDPDNAQISPYRVMLFKLSEEVSELELRSFKFLLNNEIPKCKLEDDLSLLEIFVEMEKRTMLAENNLETLKSICDQVNKSLLGKIEDYERSSTERRMSLEGREELPPSVLDEMSLKMAELCDSPREQDSESRTSDKVYQMKNKPRGYCLIINNHDFSKAREDITQLRKMKDRKGTDCDKEALSKTFKELHFEIVSYDDCTANEIHEILEGYQSADHKNKDCFICCILSHGDKGVVYGTDGKEASIYDLTSYFTGSKCPSLSGKPKIFFIQACQGSNFQKGVPDEAGFEQQNHTLEVDSSSHKNYIPDEADFLLGMATVKNCVSYRDPVNGTWYIQSLCQSLRERCPQGDDILSILTGVNYDVSNKDDRRNKGKQMPQPTFTLRKKLFFPP

SEQ ID NO: 495 - DNA, 2957 bp, Artificial sequence
  Description of Artificial Sequence: Synthetic nucleotide sequence
aagcttatggattttcaagtgcagattttcagcttcctgctaatcagtgcttcagtcataatgtccagaggagtcgacattgtgctcactcagtctccaacaaccatagctgcatctccaggggagaaggtcaccatcacctgccgtgccagctccagtgtaagttacatgtactggtaccagcagaagtcaggcgcctcccctaaactctggatttatgacacatccaagctggcttctggagttccaaatcgcttcagtggcagtgggtctgggacctcttattctctcgcaatcaacaccatggagactgaagatgctgccacttattactgtcagcagtggagtagtactccgctcacgttcgggtctgggaccaagctggagatcaaacggggtggcggtggctcgggcggtggtgggtcgggtggcggcggatctcaggtgcagctgaaggaggcaggacctggcctggtgcaaccgacacagaccctgtccctcacatgcactgtctctgggttctcattaaccagcgatggtgtacactggattcgacagcctccaggaaagggtctggaatggatgggaataatatattatgatggaggcacagattataattcagcaattaaatccagactgagcatcagcagggacacctccaagagccaagttttcttaaaaatcaacagtctgcaaactgatgacacagccatgtattactgtgccagaatccactttgattactggggccaaggagtcatggtcacagtctcctctgatctggagcccaaatcttctgacaaaactcacacatccccaccgtccccagcacctgaactcctgggtggatcgtcagtcttcctcttccccccaaaacccaaggacaccctcatgatctcccggacccctgaggtcacatgcgtggtggtggacgtgagccacgaagaccctgaggtcaagttcaactggtacgtggacggcgtggaggtgcataatgccaagacaaagccgcgggaggagcagtacaacagcacgtaccgtgtggtcagcgtcctcaccgtcctgcaccaggactggctgaatggcaaggagtacaagtgcaaggtctccaacaaagccctcccagcccccatcgagaaaaccatctccaaagccaaagggcagccccgagaaccacaggtgtacaccctgcccccatcccgggatgagctgaccaagaaccaggtcagcctgacctgcctggtcaaaggcttctatcccagcgacatcgccgtggagtgggagagcaatgggcagccggagaacaactacaagaccacgcctcccgtgctggactccgacggctccttcttcctctacagcaagctcaccgtggacaagagcaggtggcagcaggggaacgtcttctcatgctccgtgatgcatgaggctctgcacaaccactacacgcagaagagcctctccctgtctccgggtaaagcggatccttcgaacatggatttccagagttgtctttatgctattgctgaagaactgggcagtgaagacctggctgccctcaagttcctgtgcttggactacatcccacacaagaagcaggagaccatcgaggatgcccagaagctatttctgaggctgcgggaaaaggggatgttggaggaaggcaatctgtctttcctgaaagagctgcttttccacatcagtcggtgggacctgctggtcaacttcctagactgcaaccgagaggagatggtgagagagctgcgggatccagacaatgcccagatttctccctacagggtcatgctctttaagctctcagaagaagtgagcgagttggaattgagatcttttaagttccttttgaacaatgagatccccaaatgtaagctggaagatgacttgagcctgcttgaaatttttgtagaaatggagaagaggaccatgctggcagaaaataacttggaaaccctaaaatcaatctgtgaccaggtcaacaagagcctgctggggaagatcgaggattatgaaagatcaagcacagagagaagaatgagccttgaaggaagggaagagttgccaccttcagttttggatgagatgagcctcaaaatggcggaactgtgtgactcgccaagagaacaagacagtgagtcacggacttcagacaaagtttaccaaatgaagaacaaacctcggggatactgtctgatcatcaacaatcatgatttcagcaaggcccgggaagacataacccaactccgaaaaatgaaggacagaaaaggaacagactgtgataaagaggctctgagtaagacctttaaggagcttcattttgagatagtatcttacgacgactgcactgcaaatgaaatccacgagattctagaaggctaccaaagcgcagaccacaagaacaaagactgcttcatctgctgtatcctatcccacggtgacaagggtgtcgtctatggaacggatgggaaggaggcctccatctatgacctgacatcttacttcactggttcaaagtgcccttccctgtctgggaaacccaagatctttttcattcaggcttgccaaggaagtaacttccagaaaggagtgcctgatgaggcaggcttcgagcaacagaaccacactttagaagtggattcatcatctcacaagaactatattccggatgaggcagactttctgctgggaatggctacggtgaagaactgcgtttcctaccgagatcctgtgaatggaacctggtatattcagtcactttgccagagcctgagggaaagatgtcctcaaggagatgacattcttagcatcctgactggcgtgaactatgacgtgagcaataaagacgacaggaggaacaagggaaagcagatgccacagcccaccttcacactacggaagaagctcttcttccctccctaatgactcgagatcgattc

SEQ ID NO: 496 - protein, 977 aa, Artificial sequence
  Description of Artificial Sequence: Synthetic amino acid sequence
MDFQVQIFSFLLISASVIMSRGVDIVLTQSPTTIAASPGEKVTITCRASSSVSYMYWYQQKSGASPKLWIYDTSKLASGVPNRFSGSGSGTSYSLAINTMETEDAATYYCQQWSSTPLTFGSGTKLEIKRGGGGSGGGGSGGGGSQVQLKEAGPGLVQPTQTLSLTCTVSGFSLTSDGVHWIRQPPGKGLEWMGIIYYDGGTDYNSAIKSRLSISRDTSKSQVFLKINSLQTDDTAMYYCARIHFDYWGQGVMVTVSSDLEPKSSDKTHTSPPSPAPELLGGSSVFLFPPKPKDTLMISRTPEVTCVVVDVSHEDPEVKFNWYVDGVEVHNAKTKPREEQYNSTYRVVSVLTVLHQDWLNGKEYKCKVSNKALPAPIEKTISKAKGQPREPQVYTLPPSRDELTKNQVSLTCLVKGFYPSDIAVEWESNGQPENNYKTTPPVLDSDGSFFLYSKLTVDKSRWQQGNVFSCSVMHEALHNHYTQKSLSLSPGKADPSNMDFQSCLYAIAEELGSEDLAALKFLCLDYIPHKKQETIEDAQKLFLRLREKGMLEEGNLSFLKELLFHISRWDLLVNFLDCNREEMVRELRDPDNAQISPYRVMLFKLSEEVSELELRSFKFLLNNEIPKCKLEDDLSLLEIFVEMEKRTMLAENNLETLKSICDQVNKSLLGKIEDYERSSTERRMSLEGREELPPSVLDEMSLKMAELCDSPREQDSESRTSDKVYQMKNKPRGYCLIINNHDFSKAREDITQLRKMKDRKGTDCDKEALSKTFKELHFEIVSYDDCTANEIHEILEGYQSADHKNKDCFICCILSHGDKGVVYGTDGKEASIYDLTSYFTGSKCPSLSGKPKIFFIQACQGSNFQKGVPDEAGFEQQNHTLEVDSSSHKNYIPDEADFLLGMATVKNCVSYRDPVNGTWYIQSLCQSLRERCPQGDDILSILTGVNYDVSNKDDRRNKGKQMPQPTFTLRKKLFFPP

SEQ ID NO: 497 - DNA, 2344 bp, Artificial sequence
  Description of Artificial Sequence: Synthetic nucleotide sequence
aagcttatggattttcaagtgcagattttcagcttcctgctaatcagtgcttcagtcataatgtccagaggagtcgacattgtgctcactcagtctccaacaaccatagctgcatctccaggggagaaggtcaccatcacctgccgtgccagctccagtgtaagttacatgtactggtaccagcagaagtcaggcgcctcccctaaactctggatttatgacacatccaagctggcttctggagttccaaatcgcttcagtggcagtgggtctgggacctcttattctctcgcaatcaacaccatggagactgaagatgctgccacttattactgtcagcagtggagtagtactccgctcacgttcgggtctgggaccaagctggagatcaaacggggtggcggtggctcgggcggtggtgggtcgggtggcggcggatctcaggtgcagctgaaggaggcaggacctggcctggtgcaaccgacacagaccctgtccctcacatgcactgtctctgggttctcattaaccagcgatggtgtacactggattcgacagcctccaggaaagggtctggaatggatgggaataatatattatgatggaggcacagattataattcagcaattaaatccagactgagcatcagcagggacacctccaagagccaagttttcttaaaaatcaacagtctgcaaactgatgacacagccatgtattactgtgccagaatccactttgattactggggccaaggagtcatggtcacagtctcctctgatctggagcccaaatcttctgacaaaactcacacatccccaccgtccccagcacctgaactcctgggtggaccgtcagtcttcctcttccccccaaaacccaaggacaccctcatgatctcccggacccctgaggtcacatgcgtggtggtggacgtgagccacgaagaccctgaggtcaagttcaactggtacgtggacggcgtggaggtgcataatgccaagacaaagccgcgggaggagcagtacaacagcacgtaccgtgtggtcagcgtcctcaccgtcctgcaccaggactggctgaatggcaaggagtacaagtgcaaggtctccaacaaagccctcccagcccccatcgagaaaaccatctccaaagccaaagggcagccccgagaaccacaggtgtacaccctgcccccatcccgggatgagctgaccaagaaccaggtcagcctgacctgcctggtcaaaggcttctatcccagcgacatcgccgtggagtgggagagcaatgggcagccggagaacaactacaagaccacgcctcccgtgctggactccgacggctccttcttcctctacagcaagctcaccgtggacaagagcaggtggcagcaggggaacgtcttctcatgctccgtgatgcatgaggctctgcacaaccactacacgcagaagagcctctccctgtctccgggtaaagcggatccttcgaacatggagaacactgaaaactcagtggattcaaaatccattaaaaatttggaaccaaagatcatacatggaagcgaatcaatggactctggaatatccctggacaacagttataaaatggattatcctgagatgggtttatgtataataattaataataagaattttcataaaagcactggaatgacatctcggtctggtacagatgtcgatgcagcaaacctcagggaaacattcagaaacttgaaatatgaagtcaggaataaaaatgatcttacacgtgaagaaattgtggaattgatgcgtgatgtttctaaagaagatcacagcaaaaggagcagttttgtttgtgtgcttctgagccatggtgaagaaggaataatttttggaacaaatggacctgttgacctgaaaaaaataacaaactttttcagaggggatcgttgtagaagtctaactggaaaacccaaacttttcattattcaggcctgccgtggtacagaactggactgtggcattgagacagacagtggtgttgatgatgacatggcgtgtcataaaataccagtggaggccgacttcttgtatgcatactccacagcacctggttattattcttggcgaaattcaaaggatggctcctggttcatccagtcgctttgtgccatgctgaaacagtatgccgacaagcttgaatttatgcacattcttacccgggttaaccgaaaggtggcaacagaatttgagtccttttcctttgacgctacttttcatgcaaagaaacagattccatgtattgtttccatgctcacaaaagaactctatttttatcactaactcgagatcgata

SEQ ID NO: 498 - protein, 774 aa, Artificial sequence
  Description of Artificial Sequence: Synthetic amino acid sequence
MDFQVQIFSFLLISASVIMSRGVDIVLTQSPTTIAASPGEKVTITCRASSSVSYMYWYQQKSGASPKLWIYDTSKLASGVPNRFSGSGSGTSYSLAINTMETEDAATYYCQQWSSTPLTFGSGTKLEIKRGGGGSGGGGSGGGGSQVQLKEAGPGLVQPTQTLSLTCTVSGFSLTSDGVHWIRQPPGKGLEWMGIIYYDGGTDYNSAIKSRLSISRDTSKSQVFLKINSLQTDDTAMYYCARIHFDYWGQGVMVTVSSDLEPKSSDKTHTSPPSPAPELLGGPSVFLFPPKPKDTLMISRTPEVTCVVVDVSHEDPEVKFNWYVDGVEVHNAKTKPREEQYNSTYRVVSVLTVLHQDWLNGKEYKCKVSNKALPAPIEKTISKAKGQPREPQVYTLPPSRDELTKNQVSLTCLVKGFYPSDIAVEWESNGQPENNYKTTPPVLDSDGSFFLYSKLTVDKSRWQQGNVFSCSVMHEALHNHYTQKSLSLSPGKADPSNMENTENSVDSKSIKNLEPKIIHGSESMDSGISLDNSYKMDYPEMGLCIIINNKNFHKSTGMTSRSGTDVDAANLRETFRNLKYEVRNKNDLTREEIVELMRDVSKEDHSKRSSFVCVLLSHGEEGIIFGTNGPVDLKKITNFFRGDRCRSLTGKPKLFIIQACRGTELDCGIETDSGVDDDMACHKIPVEADFLYAYSTAPGYYSWRNSKDGSWFIQSLCAMLKQYADKLEFMHILTRVNRKVATEFESFSFDATFHAKKQIPCIVSMLTKELYFYH

SEQ ID NO: 499 - DNA, 2345 bp, Artificial sequence
  Description of Artificial Sequence: Synthetic nucleotide sequence
aagcttatggattttcaagtgcagattttcagcttcctgctaatcagtgcttcagtcataatgtccagaggagtcgacattgtgctcactcagtctccaacaaccatagctgcatctccaggggagaaggtcaccatcacctgccgtgccagctccagtgtaagttacatgtactggtaccagcagaagtcaggcgcctcccctaaactctggatttatgacacatccaagctggcttctggagttccaaatcgcttcagtggcagtgggtctgggacctcttattctctcgcaatcaacaccatggagactgaagatgctgccacttattactgtcagcagtggagtagtactccgctcacgttcgggtctgggaccaagctggagatcaaacggggtggcggtggctcgggcggtggtgggtcgggtggcggcggatctcaggtgcagctgaaggaggcaggacctggcctggtgcaaccgacacagaccctgtccctcacatgcactgtctctgggttctcattaaccagcgatggtgtacactggattcgacagcctccaggaaagggtctggaatggatgggaataatatattatgatggaggcacagattataattcagcaattaaatccagactgagcatcagcagggacacctccaagagccaagttttcttaaaaatcaacagtctgcaaactgatgacacagccatgtattactgtgccagaatccactttgattactggggccaaggagtcatggtcacagtctcctctgatctggagcccaaatcttctgacaaaactcacacatccccaccgtccccagcacctgaactcctgggtggatcgtcagtcttcctcttccccccaaaacccaaggacaccctcatgatctcccggacccctgaggtcacatgcgtggtggtggacgtgagccacgaagaccctgaggtcaagttcaactggtacgtggacggcgtggaggtgcataatgccaagacaaagccgcgggaggagcagtacaacagcacgtaccgtgtggtcagcgtcctcaccgtcctgcaccaggactggctgaatggcaaggagtacaagtgcaaggtctccaacaaagccctcccagcccccatcgagaaaaccatctccaaagccaaagggcagccccgagaaccacaggtgtacaccctgcccccatcccgggatgagctgaccaagaaccaggtcagcctgacctgcctggtcaaaggcttctatcccagcgacatcgccgtggagtgggagagcaatgggcagccggagaacaactacaagaccacgcctcccgtgctggactccgacggctccttcttcctctacagcaagctcaccgtggacaagagcaggtggcagcaggggaacgtcttctcatgctccgtgatgcatgaggctctgcacaaccactacacgcagaagagcctctccctgtctccgggtaaagcggatccttcgaacatggagaacactgaaaactcagtggattcaaaatccattaaaaatttggaaccaaagatcatacatggaagcgaatcaatggactctggaatatccctggacaacagttataaaatggattatcctgagatgggtttatgtataataattaataataagaattttcataaaagcactggaatgacatctcggtctggtacagatgtcgatgcagcaaacctcagggaaacattcagaaacttgaaatatgaagtcaggaataaaaatgatcttacacgtgaagaaattgtggaattgatgcgtgatgtttctaaagaagatcacagcaaaaggagcagttttgtttgtgtgcttctgagccatggtgaagaaggaataatttttggaacaaatggacctgttgacctgaaaaaaataacaaactttttcagaggggatcgttgtagaagtctaactggaaaacccaaacttttcattattcaggcctgccgtggtacagaactggactgtggcattgagacagacagtggtgttgatgatgacatggcgtgtcataaaataccagtggaggccgacttcttgtatgcatactccacagcacctggttattattcttggcgaaattcaaaggatggctcctggttcatccagtcgctttgtgccatgctgaaacagtatgccgacaagcttgaatttatgcacattcttacccgggttaaccgaaaggtggcaacagaatttgagtccttttcctttgacgctacttttcatgcaaagaaacagattccatgtattgtttccatgctcacaaaagaactctatttttatcactaactcgagatcgataa

SEQ ID NO: 500 - protein, 774 aa, Artificial sequence
  Description of Artificial Sequence: Synthetic amino acid sequence
MDFQVQIFSFLLISASVIMSRGVDIVLTQSPTTIAASPGEKVTITCRASSSVSYMYWYQQKSGASPKLWIYDTSKLASGVPNRFSGSGSGTSYSLAINTMETEDAATYYCQQWSSTPLTFGSGTKLEIKRGGGGSGGGGSGGGGSQVQLKEAGPGLVQPTQTLSLTCTVSGFSLTSDGVHWIRQPPGKGLEWMGIIYYDGGTDYNSAIKSRLSISRDTSKSQVFLKINSLQTDDTAMYYCARIHFDYWGQGVMVTVSSDLEPKSSDKTHTSPPSPAPELLGGSSVFLFPPKPKDTLMISRTPEVTCVVVDVSHEDPEVKFNWYVDGVEVHNAKTKPREEQYNSTYRVVSVLTVLHQDWLNGKEYKCKVSNKALPAPIEKTISKAKGQPREPQVYTLPPSRDELTKNQVSLTCLVKGFYPSDIAVEWESNGQPENNYKTTPPVLDSDGSFFLYSKLTVDKSRWQQGNVFSCSVMHEALHNHYTQKSLSLSPGKADPSNMENTENSVDSKSIKNLEPKIIHGSESMDSGISLDNSYKMDYPEMGLCIIINNKNFHKSTGMTSRSGTDVDAANLRETFRNLKYEVRNKNDLTREEIVELMRDVSKEDHSKRSSFVCVLLSHGEEGIIFGTNGPVDLKKITNFFRGDRCRSLTGKPKLFIIQACRGTELDCGIETDSGVDDDMACHKIPVEADFLYAYSTAPGYYSWRNSKDGSWFIQSLCAMLKQYADKLEFMHILTRVNRKVATEFESFSFDATFHAKKQIPCIVSMLTKELYFYH

SEQ ID NO: 501 - DNA, 2950 bp, Artificial sequence
  Description of Artificial Sequence: Synthetic nucleotide sequence
aagcttatggattttcaagtgcagattttcagcttcctgctaatcagtgcttcagtcataatgtccagaggagtcgacattgtgctcactcagtctccaacaaccatagctgcatctccaggggagaaggtcaccatcacctgccgtgccagctccagtgtaagttacatgtactggtaccagcagaagtcaggcgcctcccctaaactctggatttatgacacatccaagctggcttctggagttccaaatcgcttcagtggcagtgggtctgggacctcttattctctcgcaatcaacaccatggagactgaagatgctgccacttattactgtcagcagtggagtagtactccgctcacgttcgggtctgggaccaagctggagatcaaacggggtggcggtggctcgggcggtggtgggtcgggtggcggcggatctcaggtgcagctgaaggaggcaggacctggcctggtgcaaccgacacagaccctgtccctcacatgcactgtctctgggttctcattaaccagcgatggtgtacactggattcgacagcctccaggaaagggtctggaatggatgggaataatatattatgatggaggcacagattataattcagcaattaaatccagactgagcatcagcagggacacctccaagagccaagttttcttaaaaatcaacagtctgcaaactgatgacacagccatgtattactgtgccagaatccactttgattactggggccaaggagtcatggtcacagtctcctctgatctggagcccaaatcttctgacaaaactcacacatccccaccgtccccagcacctgaactcctgggtggaccgtcagtcttcctcttccccccaaaacccaaggacaccctcatgatctcccggacccctgaggtcacatgcgtggtggtggacgtgagccacgaagaccctgaggtcaagttcaactggtacgtggacggcgtggaggtgcataatgccaagacaaagccgcgggaggagcagtacaacagcacgtaccgtgtggtcagcgtcctcaccgtcctgcaccaggactggctgaatggcaaggagtacaagtgcaaggtctccaacaaagccctcccagcccccatcgagaaaaccatctccaaagccaaagggcagccccgagaaccacaggtgtacaccctgcccccatcccgggatgagctgaccaagaaccaggtcagcctgacctgcctggtcaaaggcttctatcccagcgacatcgccgtggagtgggagagcaatgggcagccggagaacaactacaagaccacgcctcccgtgctggactccgacggctccttcttcctctacagcaagctcaccgtggacaagagcaggtggcagcaggggaacgtcttctcatgctccgtgatgcatgaggctctgcacaaccactacacgcagaagagcctctccctgtctccgggtaaagcggatccttcgaacatggacttcagcagaaatctttatgatattggggaacaactggacagtgaagatctggcctccctcaagttcctgagcctggactacattccgcaaaggaagcaagaacccatcaaggatgccttgatgttattccagagactccaggaaaagagaatgttggaggaaagcaatctgtccttcctgaaggagctgctcttccgaattaatagactggatttgctgattacctacctaaacactagaaaggaggagatggaaagggaacttcagacaccaggcagggctcaaatttctgcctacagggtcatgctctatcagatttcagaagaagtgagcagatcagaattgaggtcttttaagtttcttttgcaagaggaaatctccaaatgcaaactggatgatgacatgaacctgctggatattttcatagagatggagaagagggtcatcctgggagaaggaaagttggacatcctgaaaagagtctgtgcccaaatcaacaagagcctgctgaagataatcaacgactatgaagaattcagcaaagagagaagcagcagccttgaaggaagtcctgatgaattttcaaatggggaggagttgtgtggggtaatgacaatctcggactctccaagagaacaggatagtgaatcacagactttggacaaagtttaccaaatgaaaagcaaacctcggggatactgtctgatcatcaacaatcacaattttgcaaaagcacgggagaaagtgcccaaacttcacagcattagggacaggaatggaacacacttggatgcaggggctttgaccacgacctttgaagagcttcattttgagatcaagccccacgatgactgcacagtagagcaaatctatgagattttgaaaatctaccaactcatggaccacagtaacatggactgcttcatctgctgtatcctctcccatggagacaagggcatcatctatggcactgatggacaggaggcccccatctatgagctgacatctcagttcactggtttgaagtgcccttcccttgctggaaaacccaaagtgttttttattcaggcttgtcagggggataactaccagaaaggtatacctgttgagactgattcagaggagcaaccctatttagaaatggatttatcatcacctcaaacgagatatatcccggatgaggctgactttctgctggggatggccactgtgaataactgtgtttcctaccgaaaccctgcagagggaacctggtacatccagtcactttgccagagcctgagagagcgatgtcctcgaggcgatgatattctcaccatcctgactgaagtgaactatgaagtaagcaacaaggatgacaagaaaaacatggggaaacagatgcctcagcctactttcacactaagaaaaaaacttgtcttcccttctgattgagcatgcatcgata

SEQ ID NO: 502 - protein, 976 aa, Artificial sequence
  Description of Artificial Sequence: Synthetic amino acid sequence
MDFQVQIFSFLLISASVIMSRGVDIVLTQSPTTIAASPGEKVTITCRASSSVSYMYWYQQKSGASPKLWIYDTSKLASGVPNRFSGSGSGTSYSLAINTMETEDAATYYCQQWSSTPLTFGSGTKLEIKRGGGGSGGGGSGGGGSQVQLKEAGPGLVQPTQTLSLTCTVSGFSLTSDGVHWIRQPPGKGLEWMGIIYYDGGTDYNSAIKSRLSISRDTSKSQVFLKINSLQTDDTAMYYCARIHFDYWGQGVMVTVSSDLEPKSSDKTHTSPPSPAPELLGGPSVFLFPPKPKDTLMISRTPEVTCVVVDVSHEDPEVKFNWYVDGVEVHNAKTKPREEQYNSTYRVVSVLTVLHQDWLNGKEYKCKVSNKALPAPIEKTISKAKGQPREPQVYTLPPSRDELTKNQVSLTCLVKGFYPSDIAVEWESNGQPENNYKTTPPVLDSDGSFFLYSKLTVDKSRWQQGNVFSCSVMHEALHNHYTQKSLSLSPGKADPSNMDFSRNLYDIGEQLDSEDLASLKFLSLDYIPQRKQEPIKDALMLFQRLQEKRMLEESNLSFLKELLFRINRLDLLITYLNTRKEEMERELQTPGRAQISAYRVMLYQISEEVSRSELRSFKFLLQEEISKCKLDDDMNLLDIFIEMEKRVILGEGKLDILKRVCAQINKSLLKIINDYEEFSKERSSSLEGSPDEFSNGEELCGVMTISDSPREQDSESQTLDKVYQMKSKPRGYCLIINNHNFAKAREKVPKLHSIRDRNGTHLDAGALTTTFEELHFEIKPHDDCTVEQIYEILKIYQLMDHSNMDCFICCILSHGDKGIIYGTDGQEAPIYELTSQFTGLKCPSLAGKPKVFFIQACQGDNYQKGIPVETDSEEQPYLEMDLSSPQTRYIPDEADFLLGMATVNNCVSYRNPAEGTWYIQSLCQSLRERCPRGDDILTILTEVNYEVSNKDDKKNMGKQMPQPTFTLRKKLVFPSD

SEQ ID NO: 503 - DNA, 2951 bp, Artificial sequence
  Description of Artificial Sequence: Synthetic nucleotide sequence
aagcttatggattttcaagtgcagattttcagcttcctgctaatcagtgcttcagtcataatgtccagaggagtcgacattgtgctcactcagtctccaacaaccatagctgcatctccaggggagaaggtcaccatcacctgccgtgccagctccagtgtaagttacatgtactggtaccagcagaagtcaggcgcctcccctaaactctggatttatgacacatccaagctggcttctggagttccaaatcgcttcagtggcagtgggtctgggacctcttattctctcgcaatcaacaccatggagactgaagatgctgccacttattactgtcagcagtggagtagtactccgctcacgttcgggtctgggaccaagctggagatcaaacggggtggcggtggctcgggcggtggtgggtcgggtggcggcggatctcaggtgcagctgaaggaggcaggacctggcctggtgcaaccgacacagaccctgtccctcacatgcactgtctctgggttctcattaaccagcgatggtgtacactggattcgacagcctccaggaaagggtctggaatggatgggaataatatattatgatggaggcacagattataattcagcaattaaatccagactgagcatcagcagggacacctccaagagccaagttttcttaaaaatcaacagtctgcaaactgatgacacagccatgtattactgtgccagaatccactttgattactggggccaaggagtcatggtcacagtctcctctgatctggagcccaaatcttctgacaaaactcacacatccccaccgtccccagcacctgaactcctgggtggatcgtcagtcttcctcttccccccaaaacccaaggacaccctcatgatctcccggacccctgaggtcacatgcgtggtggtggacgtgagccacgaagaccctgaggtcaagttcaactggtacgtggacggcgtggaggtgcataatgccaagacaaagccgcgggaggagcagtacaacagcacgtaccgtgtggtcagcgtcctcaccgtcctgcaccaggactggctgaatggcaaggagtacaagtgcaaggtctccaacaaagccctcccagcccccatcgagaaaaccatctccaaagccaaagggcagccccgagaaccacaggtgtacaccctgcccccatcccgggatgagctgaccaagaaccaggtcagcctgacctgcctggtcaaaggcttctatcccagcgacatcgccgtggagtgggagagcaatgggcagccggagaacaactacaagaccacgcctcccgtgctggactccgacggctccttcttcctctacagcaagctcaccgtggacaagagcaggtggcagcaggggaacgtcttctcatgctccgtgatgcatgaggctctgcacaaccactacacgcagaagagcctctccctgtctccgggtaaagcggatccttcgaacatggacttcagcagaaatctttatgatattggggaacaactggacagtgaagatctggcctccctcaagttcctgagcctggactacattccgcaaaggaagcaagaacccatcaaggatgccttgatgttattccagagactccaggaaaagagaatgttggaggaaagcaatctgtccttcctgaaggagctgctcttccgaattaatagactggatttgctgattacctacctaaacactagaaaggaggagatggaaagggaacttcagacaccaggcagggctcaaatttctgcctacagggtcatgctctatcagatttcagaagaagtgagcagatcagaattgaggtcttttaagtttcttttgcaagaggaaatctccaaatgcaaactggatgatgacatgaacctgctggatattttcatagagatggagaagagggtcatcctgggagaaggaaagttggacatcctgaaaagagtctgtgcccaaatcaacaagagcctgctgaagataatcaacgactatgaagaattcagcaaagagagaagcagcagccttgaaggaagtcctgatgaattttcaaatggggaggagttgtgtggggtaatgacaatctcggactctccaagagaacaggatagtgaatcacagactttggacaaagtttaccaaatgaaaagcaaacctcggggatactgtctgatcatcaacaatcacaattttgcaaaagcacgggagaaagtgcccaaacttcacagcattagggacaggaatggaacacacttggatgcaggggctttgaccacgacctttgaagagcttcattttgagatcaagccccacgatgactgcacagtagagcaaatctatgagattttgaaaatctaccaactcatggaccacagtaacatggactgcttcatctgctgtatcctctcccatggagacaagggcatcatctatggcactgatggacaggaggcccccatctatgagctgacatctcagttcactggtttgaagtgcccttcccttgctggaaaacccaaagtgttttttattcaggcttgtcagggggataactaccagaaaggtatacctgttgagactgattcagaggagcaaccctatttagaaatggatttatcatcacctcaaacgagatatatcccggatgaggctgactttctgctggggatggccactgtgaataactgtgtttcctaccgaaaccctgcagagggaacctggtacatccagtcactttgccagagcctgagagagcgatgtcctcgaggcgatgatattctcaccatcctgactgaagtgaactatgaagtaagcaacaaggatgacaagaaaaacatggggaaacagatgcctcagcctactttcacactaagaaaaaaacttgtcttcccttctgattgagcatgcatcgataa

SEQ ID NO: 504 - protein, 976 aa, Artificial sequence
  Description of Artificial Sequence: Synthetic amino acid sequence
MDFQVQIFSFLLISASVIMSRGVDIVLTQSPTTIAASPGEKVTITCRASSSVSYMYWYQQKSGASPKLWIYDTSKLASGVPNRFSGSGSGTSYSLAINTMETEDAATYYCQQWSSTPLTFGSGTKLEIKRGGGGSGGGGSGGGGSQVQLKEAGPGLVQPTQTLSLTCTVSGFSLTSDGVHWIRQPPGKGLEWMGIIYYDGGTDYNSAIKSRLSISRDTSKSQVFLKINSLQTDDTAMYYCARIHFDYWGQGVMVTVSSDLEPKSSDKTHTSPPSPAPELLGGSSVFLFPPKPKDTLMISRTPEVTCVVVDVSHEDPEVKFNWYVDGVEVHNAKTKPREEQYNSTYRVVSVLTVLHQDWLNGKEYKCKVSNKALPAPIEKTISKAKGQPREPQVYTLPPSRDELTKNQVSLTCLVKGFYPSDIAVEWESNGQPENNYKTTPPVLDSDGSFFLYSKLTVDKSRWQQGNVFSCSVMHEALHNHYTQKSLSLSPGKADPSNMDFSRNLYDIGEQLDSEDLASLKFLSLDYIPQRKQEPIKDALMLFQRLQEKRMLEESNLSFLKELLFRINRLDLLITYLNTRKEEMERELQTPGRAQISAYRVMLYQISEEVSRSELRSFKFLLQEEISKCKLDDDMNLLDIFIEMEKRVILGEGKLDILKRVCAQINKSLLKIINDYEEFSKERSSSLEGSPDEFSNGEELCGVMTISDSPREQDSESQTLDKVYQMKSKPRGYCLIINNHNFAKAREKVPKLHSIRDRNGTHLDAGALTTTFEELHFEIKPHDDCTVEQIYEILKIYQLMDHSNMDCFICCILSHGDKGIIYGTDGQEAPIYELTSQFTGLKCPSLAGKPKVFFIQACQGDNYQKGIPVETDSEEQPYLEMDLSSPQTRYIPDEADFLLGMATVNNCVSYRNPAEGTWYIQSLCQSLRERCPRGDDILTILTEVNYEVSNKDDKKNMGKQMPQPTFTLRKKLVFPSD

SEQ ID NO: 505 - DNA, 1254 bp, Artificial sequence
  Description of Artificial Sequence: Synthetic nucleotide sequence
atggcttgccttggatttcagcggcacaaggctcagctgaacctggctgccaggacctggccctgcactctcctgttttttcttctcttcatccctgtcttctgcaaagcaatgcacgtggcccagcctgctgtggtactggccagcagccgaggcatcgccagctttgtgtgtgagtatgcatctccaggcaaagccactgaggtccgggtgacagtgcttcggcaggctgacagccaggtgactgaagtctgtgcggcaacctacatgacggggaatgagttgaccttcctagatgattccatctgcacgggcacctccagtggaaatcaagtgaacctcactatccaaggactgagggccatggacacgggactctacatctgcaaggtggagctcatgtacccaccgccatactacctgggcataggcaacggaacccagatttatgtaattgatccagaaccgtgcccagattctgatcagccagttccctcaactccacctaccccatctccctcaactccacctaccccatctccctcatgctgccacccccgactgtcactgcaccgaccggccctcgaggacctgctcttaggttcagaagcgatcctcacgtgcacactgaccggcctgagagatgcctcaggtgtcaccttcacctggacgccctcaagtgggaagagcgctgttcaaggaccacctgaccgtgacctctgtggctgctacagcgtgtccagtgtcctgccgggctgtgccgagccatggaaccatgggaagaccttcacttgcactgctgcctaccccgagtccaagaccccgctaaccgccaccctctcaaaatccggaaacacattccggcccgaggtccacctgctgccgccgccgtcggaggagctggccctgaacgagctggtgacgctgacgtgcctggcacgtggcttcagccccaaggatgtgctggttcgctggctgcaggggtcacaggagctgccccgcgagaagtacctgacttgggcatcccggcaggagcccagccagggcaccaccaccttcgctgtgaccagcatactgcgcgtggcagccgaggactggaagaagggggacaccttctcctgcatggtgggccacgaggccctgccgctggccttcacacagaagaccatcgaccgcttggcgggtaaacccacccatgtcaatgtgtctgttgtcatggcggaggtggacggcacctgctactgataatctaga

SEQ ID NO: 506 - protein, 414 aa, Artificial sequence [sequence omitted]

SEQ ID NO: 507 - DNA, 1242 bp, Artificial sequence
  Description of Artificial Sequence: Synthetic nucleotide sequence
atggcttgccttggatttcagcggcacaaggctcagctgaacctggctgccaggacctggccctgcactctcctgttttttcttctcttcatccctgtcttctgcaaagcaatgcacgtggcccagcctgctgtggtactggccagcagccgaggcatcgccagctttgtgtgtgagtatgcatctccaggcaaagccactgaggtccgggtgacagtgcttcggcaggctgacagccaggtgactgaagtctgtgcggcaacctacatgacggggaatgagttgaccttcctagatgattccatctgcacgggcacctccagtggaaatcaagtgaacctcactatccaaggactgagggccatggacacgggactctacatctgcaaggtggagctcatgtacccaccgccatactacctgggcataggcaacggaacccagatttatgtaattgatccagaaccgtgcccagattctgatcagccagttccctcaactccacctaccccatctccctcaactccacctaccccatctccctcatgctgccacccccgactgtcactgcaccgaccggccctcgaggacctgctcttaggttcagaagcgatcctcacgtgcacactgaccggcctgagagatgcctcaggtgtcaccttcacctggacgccctcaagtgggaagagcgctgttcaaggaccacctgaccgtgacctctgtggctgctacagcgtgtccagtgtcctgccgggctgtgccgagccatggaaccatgggaagaccttcacttgcactgctgcctaccccgagtccaagaccccgctaaccgccaccctctcaaaatccggaaacacattccggcccgaggtccacctgctgccgccgccgtcggaggagctggccctgaacgagctggtgacgctgacgtgcctggcacgtggcttcagccccaaggatgtgctggttcgctggctgcaggggtcacaggagctgccccgcgagaagtacctgacttgggcatcccggcaggagcccagccagggcaccaccaccttcgctgtgaccagcatactgcgcgtggcagccgaggactggaagaagggggacaccttctcctgcatggtgggccacgaggccctgccgctggccttcacacagaagaccatcgaccgcttggcgggtaaacccacccatgtcaatgtgtctgttgtcatggcggaggtggactgataatctaga

SEQ ID NO: 508 - protein, 410 aa, Artificial sequence
  Description of Artificial Sequence: Synthetic amino acid sequence
MACLGFQRHKAQLNLAARTWPCTLLFFLLFIPVFCKAMHVAQPAVVLASSRGIASFVCEYASPGKATEVRVTVLRQADSQVTEVCAATYMTGNELTFLDDSICTGTSSGNQVNLTIQGLRAMDTGLYICKVELMYPPPYYLGIGNGTQIYVIDPEPCPDSDQPVPSTPPTPSPSTPPTPSPSCCHPRLSLHRPALEDLLLGSEAILTCTLTGLRDASGVTFTWTPSSGKSAVQGPPDRDLCGCYSVSSVLPGCAEPWNHGKTFTCTAAYPESKTPLTATLSKSGNTFRPEVHLLPPPSEELALNELVTLTCLARGFSPKDVLVRWLQGSQELPREKYLTWASRQEPSQGTTTFAVTSILRVAAEDWKKGDTFSCMVGHEALPLAFTQKTIDRLAGKPTHVNVSVVMAEVD

SEQ ID NO: 509 - DNA, 721 bp, Artificial sequence
  Description of Artificial Sequence: Synthetic nucleotide sequence
tgatcagccagttccctcaactccacctaccccatctccctcaactccacctaccccatctccctcatgctgccacccccgactgtcactgcaccgaccggccctcgaggacctgctcttaggttcagaagcgatcctcacgtgcacactgaccggcctgagagatgcctcaggtgtcaccttcacctggacgccctcaagtgggaagagcgctgttcaaggaccacctgaccgtgacctctgtggctgctacagcgtgtccagtgtcctgccgggctgtgccgagccatggaaccatgggaagaccttcacttgcactgctgcctaccccgagtccaagaccccgctaaccgccaccctctcaaaatccggaaacacattccggcccgaggtccacctgctgccgccgccgtcggaggagctggccctgaacgagctggtgacgctgacgtgcctggcacgtggcttcagccccaaggatgtgctggttcgctggctgcaggggtcacaggagctgccccgcgagaagtacctgacttgggcatcccggcaggagcccagccagggcaccaccaccttcgctgtgaccagcatactgcgcgtggcagccgaggactggaagaagggggacaccttctcctgcatggtgggccacgaggccctgccgctggccttcacacagaagaccatcgaccgcttggcgggtaaatgataatctaga

SEQ ID NO: 510 - protein, 236 aa, Artificial sequence; identical to SEQ ID NO: 74
  Description of Artificial Sequence: Synthetic amino acid sequence

SEQ ID NO: 511 - DNA, 1680 bp, Artificial sequence
  Description of Artificial Sequence: Synthetic nucleotide sequence
aagcttatggattttcaagtgcagattttcagcttcctgctaatcagtgcttcagtcataatgtccagaggagtcgacatccagatgacacagactacatcctccctgtctgcctctctgggagacagagtcaccatcagttgcagggcaagtcaggacattcgcaattatttaaactggtatcagcagaaaccagatggaactgttaaactcctgatctactacacatcaagattacactcaggagtcccatcaaggttcagtggcagtgggtctggaacagattattctctcaccattgccaacctgcaaccagaagatattgccacttacttttgccaacagggtaatacgcttccgtggacgttcggtggaggcaccaaactggtaaccaaacgggagctcggtggcggtggctcgggcggtggtgggtcgggtggcggcggatctatcgatgaggtccagctgcaacagtctggacctgaactggtgaagcctggagcttcaatgtcctgcaaggcctctggttactcattcactggctacatcgtgaactggctgaagcagagccatggaaagaaccttgagtggattggacttattaatccatacaaaggtcttactacctacaaccagaaattcaagggcaaggccacattaactgtagacaagtcatccagcacagcctacatggagctcctcagtctgacatctgaagactctgcagtctattactgtgcaagatctgggtactatggtgactcggactggtacttcgatgtctggggcgcagggaccacggtcaccgtctcctctgatctggagcccaaatcttctgacaaaactcacacatccccaccgtccccagcacctgaactcctggggggaccgtcagtcttcctcttccccccaaaacccaaggacaccctcatgatctcccggacccctgaggtcacatgcgtggtggtggacgtgagccacgaagaccctgaggtcaagttcaactggtacgtggacggcgtggaggtgcataatgccaagacaaagccgcgggaggagcagtacaacagcacgtaccgtgtggtcagcgtcctcaccgtcctgcaccaggactggctgaatggcaaggagtacaagtgcaaggtctccaacaaagccctcccagcccccatcgagaaaaccatctccaaagccaaagggcagccccgagaaccacaggtgtacaccctgcccccatcccgggatgagctgaccaagaaccaggtcagcctgacctgcctggtcaaaggcttctatcccagcgacatcgccgtggagtgggagagcaatgggcagccggagaacaactacaagaccacgcctcccgtgctggactccgacggctccttcttcctctacagcaagctcaccgtggacaagagcaggtggcagcaggggaacgtcttctcatgctccgtgatgcatgaggctctgcacaaccactacacgcagaagagcctctccctgtctccgggtaaagcggatccttcgaacctgctcccatcctgggccattaccttaatctcagtaaatggaatttttgtgatatgctgcctgacctactgctttgccccaagatgcagagagagaaggaggaatgagagattgagaagggaaagtgtacgccctgtataaatcgat

SEQ ID NO: 512 - protein, 555 aa, Artificial sequence
  Description of Artificial Sequence: Synthetic amino acid sequence
MDFQVQIFSFLLISASVIMSRGVDIQMTQTTSSLSASLGDRVTISCRASQDIRNYLNWYQQKPDGTVKLLIYYTSRLHSGVPSRFSGSGSGTDYSLTIANLQPEDIATYFCQQGNTLPWTFGGGTKLVTKRELGGGGSGGGGSGGGGSIDEVQLQQSGPELVKPGASMSCKASGYSFTGYIVNWLKQSHGKNLEWIGLINPYKGLTTYNQKFKGKATLTVDKSSSTAYMELLSLTSEDSAVYYCARSGYYGDSDWYFDVWGAGTTVTVSSDLEPKSSDKTHTSPPSPAPELLGGPSVFLFPPKPKDTLMISRTPEVTCVVVDVSHEDPEVKFNWYVDGVEVHNAKTKPREEQYNSTYRVVSVLTVLHQDWLNGKEYKCKVSNKALPAPIEKTISKAKGQPREPQVYTLPPSRDELTKNQVSLTCLVKGFYPSDIAVEWESNGQPENNYKTTPPVLDSDGSFFLYSKLTVDKSRWQQGNVFSCSVMHEALHNHYTQKSLSLSPGKADPSNLLPSWAITLISVNGIFVICCLTYCFAPRCRERRRNERLRRESVRPV

SEQ ID NO: 513 - DNA, 780 bp, Artificial sequence
  Description of Artificial Sequence: Synthetic nucleotide sequence
aagcttgccgccatgtggcagctgctcctcccaactgctctgctacttctagtttcagctggcatgcggactgaagatctcccaaaggctgtggtgttcctggagcctcaatggtacagggtgctcgagaaggacagtgtgactctgaagtgccagggagcctactcccctgaggacaattccacacagtggtttcacaatgagagcctcatctcaagccaggcctcgagctacttcattgacgctgccacagtcgacgacagtggagagtacaggtgccagacaaacctctccaccctcagtgacccggtgcagctagaagtccatatcggctggctgttgctccaggcccctcggtgggtgttcaaggaggaagaccctattcacctgaggtgtcacagctggaagaacactgctctgcataaggtcacatatttacagaatggcaaaggcaggaagtattttcatcataattctgacttctacattccaaaagccacactcaaagacagcggctcctacttctgcagggggcttgttgggagtaaaaatgtgtcttcagagactgtgaacatcaccatcactcaaggtttggcagtgtcaaccatctcatcattctttccacctgggtaccaagtctctttctgcttggtgatggtactcctttttgcagtggacacaggactatatttctctgtgaagacaaacattcgaagctcaacaagagactggaaggaccataaatttaaatggagaaaggaccctcaagacaaatgaccc

SEQ ID NO: 514 - protein, 254 aa, Artificial sequence
  Description of Artificial Sequence: Synthetic amino acid sequence
MWQLLLPTALLLLVSAGMRTEDLPKAVVFLEPQWYRVLEKDSVTLKCQGAYSPEDNSTQWFHNESLISSQASSYFIDAATVDDSGEYRCQTNLSTLSDPVQLEVHIGWLLLQAPRWVFKEEDPIHLRCHSWKNTALHKVTYLQNGKGRKYFHHNSDFYIPKATLKDSGSYFCRGLVGSKNVSSETVNITITQGLAVSTISSFFPPGYQVSFCLVMVLLFAVDTGLYFSVKTNIRSSTRDWKDHKFKWRKDPQDK

SEQ ID NO: 515 - protein, 4 aa, Homo sapiens
CPPC

SEQ ID NO: 516 - protein, 5 aa, Artificial Sequence
  Description of Artificial Sequence: Synthetic linker peptide
GGGGS

SEQ ID NO: 517 - DNA, 36 bp, Artificial Sequence
  Description of Artificial Sequence: Synthetic primer
gttgtcgactgcaccggtctttgtctctctctcttc

SEQ ID NO: 518 - DNA, 48 bp, Artificial Sequence
  Description of Artificial Sequence: Synthetic primer
gttgtggatccttcgaaccccttttgggtgctggtggtggttggtgga

SEQ ID NO: 519 - DNA, 42 bp, Artificial Sequence
  Description of Artificial Sequence: Synthetic primer
gttgttatcgatctcgagtcaggagcgataggctgcgaagtc

SEQ ID NO: 520 - protein, 4 aa, Artificial Sequence
  Description of Artificial Sequence: Synthetic hinge construct
SSSS

SEQ ID NO: 521 - protein, 4 aa, Artificial Sequence
  Description of Artificial Sequence: Synthetic hinge construct
CSSS

SEQ ID NO: 522 - protein, 4 aa, Artificial Sequence
  Description of Artificial Sequence: Synthetic hinge construct
SCSS

SEQ ID NO: 523 - protein, 4 aa, Artificial Sequence
  Description of Artificial Sequence: Synthetic hinge construct
CSCS

SEQ ID NO: 524 - protein, 4 aa, Artificial Sequence
  Description of Artificial Sequence: Synthetic hinge construct
SSCP

SEQ ID NO: 525 - protein, 4 aa, Artificial Sequence
  Description of Artificial Sequence: Synthetic hinge construct
CCCP

SEQ ID NO: 526 - protein, 4 aa, Artificial Sequence
  Description of Artificial Sequence: Synthetic hinge construct
CCSP

SEQ ID NO: 527 - protein, 4 aa, Artificial Sequence
  Description of Artificial Sequence: Synthetic hinge construct
SCCP

SEQ ID NO: 528 - protein, 4 aa, Artificial Sequence
  Description of Artificial Sequence: Synthetic peptide
YVAD

SEQ ID NO: 529 - protein, 15 aa, Artificial Sequence
  Description of Artificial Sequence: Synthetic linker peptide
GGGGSGGGGSGGGGS

SEQ ID NO: 530 - DNA, 43 bp, Artificial Sequence
  Description of Artificial Sequence: Synthetic primer
gtcaagcttgccgccatggattttcaagtgcagatttttcagc

SEQ ID NO: 531 - DNA, 74 bp, Artificial Sequence
  Description of Artificial Sequence: Synthetic primer
gtcgtcgagctcccacctcctccagatccaccaccgcccgagccaccgccacctttcagctccagcttggtccc

SEQ ID NO: 532 - DNA, 37 bp, Artificial Sequence
  Description of Artificial Sequence: Synthetic primer
gctgctgagctctcaggcttatctacagcaagtctgg

SEQ ID NO: 533 - DNA, 32 bp, Artificial Sequence
  Description of Artificial Sequence: Synthetic primer
gttgtctgatcagagacggtgaccgtggtccc

SEQ ID NO: 534 - DNA, 36 bp, Artificial Sequence
  Description of Artificial Sequence: Synthetic primer
gtggatccaggttcgaagtctccaaaggcacaggcc

SEQ ID NO: 535 - DNA, 34 bp, Artificial Sequence
  Description of Artificial Sequence: Synthetic primer
gttgtcggatccagaaaacagctttgaaatgcaa

SEQ ID NO: 536 - DNA, 44 bp, Artificial Sequence
  Description of Artificial Sequence: Synthetic primer
gttgtttctagattatcactcgagtttgagtaagccaaaggacg

SEQ ID NO: 537 - DNA, 35 bp, Artificial Sequence
  Description of Artificial Sequence: Synthetic primer
gttgtcggatccaagaaggttggacaagatagaag

SEQ ID NO: 538 - DNA, 44 bp, Artificial Sequence; identical to SEQ ID NO: 536
  Description of Artificial Sequence: Synthetic primer

SEQ ID NO: 539 - DNA, 23 bp, Artificial Sequence
  Description of Artificial Sequence: Synthetic primer
gtctatataagcagagctctggc

SEQ ID NO: 540 - DNA, 25 bp, Artificial Sequence
  Description of Artificial Sequence: Synthetic primer
cgaggctgatcagcgagctctagca

SEQ ID NO: 541 - DNA, 25 bp, Artificial Sequence
  Description of Artificial Sequence: Synthetic primer
ccgcaatttgaggattctgatcacc

SEQ ID NO: 542 - DNA, 35 bp, Artificial Sequence
  Description of Artificial Sequence: Synthetic primer
gttgttgatcaagaaccacatggaggatgcacgtg

SEQ ID NO: 543 - DNA, 32 bp, Artificial Sequence
  Description of Artificial Sequence: Synthetic primer
gttgttgatcaagaacccaagacaccaaaacc

SEQ ID NO: 544 - DNA, 33 bp, Artificial Sequence
  Description of Artificial Sequence: Synthetic primer
gttgttgatcaagcgcaccacagcgaagacccc

SEQ ID NO: 545 - DNA, 42 bp, Artificial Sequence
  Description of Artificial Sequence: Synthetic primer
gttgtttctagattactatttacccgaagactgggtgatgga

SEQ ID NO: 546 - DNA, 19 bp, Artificial Sequence
  Description of Artificial Sequence: Synthetic primer
ctgagatcgagttcagctg

SEQ ID NO: 547 - DNA, 19 bp, Artificial Sequence
  Description of Artificial Sequence: Synthetic primer
cctcctttggctttgtctc

SEQ ID NO: 548 - DNA, 64 bp, Artificial Sequence
  Description of Artificial Sequence: Synthetic primer
gttgttgatcaggagcccaaatcttctgacaaaactcacacatctccaccgtgcccagcacctg

SEQ ID NO: 549 - DNA, 51 bp, Artificial Sequence
  Description of Artificial Sequence: Synthetic primer
gttgttgatcaggagcccaaatcttctgacaaaactcacacatgcccaccg

SEQ ID NO: 550 - DNA, 39 bp, Artificial Sequence
  Description of Artificial Sequence: Synthetic primer
gttgttgatcaggagcccaaatcttgtgacaaaactcac

SEQ ID NO: 551 - DNA, 52 bp, Artificial Sequence
  Description of Artificial Sequence: Synthetic primer
gttgtttctagatcatttacccggagacagggagaggctcttctgcgtgtag

SEQ ID NO: 552 - DNA, 56 bp, Artificial Sequence
  Description of Artificial Sequence: Synthetic primer
ggaggtgggagctctcaggcttatctacagcagtctggggctgagtcggtgaggcc

SEQ ID NO: 553 - DNA, 30 bp, Artificial Sequence
  Description of Artificial Sequence: Synthetic primer
gtctctagactatcatttacccggagacag

SEQ ID NO: 554 - DNA, 54 bp, Artificial Sequence
  Description of Artificial Sequence: Synthetic primer
ccatctccctcaactccacctaccccatctccctcatgcgcacctgaactcctg

SEQ ID NO: 555 - DNA, 50 bp, Artificial Sequence
  Description of Artificial Sequence: Synthetic primer
gttgttgatcagccagttccctcaactccacctaccccatctccccaact

SEQ ID NO: 556 - DNA, 30 bp, Artificial Sequence; identical to SEQ ID NO: 553
  Description of Artificial Sequence: Synthetic primer

SEQ ID NO: 557 - DNA, 51 bp, Artificial Sequence
  Description of Artificial Sequence: Synthetic primer
gttgtttctagattatcagtagcaggtgccgtccacctccgccatgacaac

SEQ ID NO: 558 - DNA, 36 bp, Artificial Sequence
  Description of Artificial Sequence: Synthetic primer
gttgttagatctcaagaagatgaaaggattgttctt

SEQ ID NO: 559 - DNA, 36 bp, Artificial Sequence
  Description of Artificial Sequence: Synthetic primer
gttgtttctagattagtcaggatagcaggcatctgg

SEQ ID NO: 560 - DNA, 70 bp, Artificial Sequence
  Description of Artificial Sequence: Synthetic primer
gatcaatccaactctgaagaagcaaagaaagaggaggccaaaaaggaggaagccaagaaatctaacagcg

SEQ ID NO: 561 - DNA, 51 bp, Artificial Sequence
  Description of Artificial Sequence: Synthetic primer
gttgttgatcagccagttccctcaactccacctaccccatctccctcaact

SEQ ID NO: 562 - DNA, 45 bp, Artificial Sequence
  Description of Artificial Sequence: Synthetic primer
gttgtttctagattatcagtccacctccgccatgacaacagacac

SEQ ID NO: 563 - DNA, 70 bp, Artificial Sequence
  Description of Artificial Sequence: Synthetic primer
tcgacgctgttagatttcttggcttcctcctttttggcctcctctttctttgcttcttcagagttggatt

SEQ ID NO: 564 - DNA, 51 bp, Artificial Sequence; identical to SEQ ID NO: 561
  Description of Artificial Sequence: Synthetic primer

SEQ ID NO: 565 - DNA, 45 bp, Artificial Sequence
  Description of Artificial Sequence: Synthetic primer
gttgtttctagattatcatttacccgccaagcggtcgatggtctt

SEQ ID NO: 566 - protein, 10 aa, Artificial Sequence
  Description of Artificial Sequence: Synthetic peptide
PAPELLDGPS

SEQ ID NO: 567 - protein, 10 aa, Artificial Sequence
  Description of Artificial Sequence: Synthetic peptide
PAPELLDGSS

SEQ ID NO: 568 - DNA, 72 bp, Artificial Sequence
  Description of Artificial Sequence: Synthetic primer
gttgttgaagacgttcccctgctgccacctgctcttgtccacggtgagcttgctgtagaggtagaaggagcc

SEQ ID NO: 569 - DNA, 72 bp, Artificial Sequence
  Description of Artificial Sequence: Synthetic primer
gttgttgaagacgttcccctgctgccacctgctcttgtccacggtgagcttgctgtagagggcgaaggagcc

SEQ ID NO: 570 - DNA, 72 bp, Artificial Sequence
  Description of Artificial Sequence: Synthetic primer
gttgttgaagacgttcccctgctgccacctgctcttgtccacggtgagcttgctggcgaggaagaaggagcc

SEQ ID NO: 571 - DNA, 72 bp, Artificial Sequence
  Description of Artificial Sequence: Synthetic primer
gttgttgaagacgttcccctgctgccacctgctcttgtccacggtgagcttgctggcgaggtagaaggagcc

SEQ ID NO: 572 - DNA, 72 bp, Artificial Sequence
  Description of Artificial Sequence: Synthetic primer
gttgttgaagacgttcccctgctgccacctgctcttgtccacggtgagcttgctggcgagggcgaaggagcc

SEQ ID NO: 573 - DNA, 63 bp, Artificial Sequence; identical to SEQ ID NO: 142
  Description of Artificial Sequence: Synthetic primer

SEQ ID NO: 574 - DNA, 52 bp, Artificial Sequence; identical to SEQ ID NO: 551
  Description of Artificial Sequence: Synthetic primer

SEQ ID NO: 575 - DNA, 35 bp, Artificial Sequence
  Description of Artificial Sequence: Synthetic primer
gttgttgatcacgtctgctccagggacttcacccc

SEQ ID NO: 576 - DNA, 49 bp, Artificial Sequence
  Description of Artificial Sequence: Synthetic primer
gttgtttctagattaacttttaccgggatttacagacaccgctcgctgg

SEQ ID NO: 577 - DNA, 56 bp, Artificial Sequence; identical to SEQ ID NO: 552
  Description of Artificial Sequence: Synthetic primer

SEQ ID NO: 578 - DNA, 30 bp, Artificial Sequence; identical to SEQ ID NO: 553
  Description of Artificial Sequence: Synthetic primer

SEQ ID NO: 579 - DNA, 33 bp, Artificial Sequence
  Description of Artificial Sequence: Synthetic primer
gttgttgtcgacatccagatgactcagtctcca

SEQ ID NO: 580 - DNA, 41 bp, Artificial Sequence
  Description of Artificial Sequence: Synthetic primer
gtcaagcttgccgccatggtatccacagctcagttccttgg

SEQ ID NO: 581 - DNA, 57 bp, Artificial Sequence
  Description of Artificial Sequence: Synthetic primer
gccacccgacccaccaccgcccgagccaccgccacctttgatctccagttcggtgcc

SEQ ID NO: 582 - DNA, 60 bp, Artificial Sequence
  Description of Artificial Sequence: Synthetic primer
tcgggcggtggtgggtcgggtggcggcggatcgtcagcggtccagctgcagcagtctgga

SEQ ID NO: 583 - DNA, 39 bp, Artificial Sequence
  Description of Artificial Sequence: Synthetic primer
tcagtgctgatcagaagagacggtgactgaggttccttg

SEQ ID NO: 584 - DNA, 32 bp, Artificial Sequence
  Description of Artificial Sequence: Synthetic primer
gcagcagtctggacctgagtcggaaaagcctg

SEQ ID NO: 585 - DNA, 30 bp, Artificial Sequence
  Description of Artificial Sequence: Synthetic primer
ctcaggtccagactgctgcagctggaccgc

SEQ ID NO: 586 - DNA, 50 bp, Artificial Sequence
  Description of Artificial Sequence: Synthetic primer
ggatccacccgctgctgcaaaaacattccctccaatgccacctccgtgac

SEQ ID NO: 587 - DNA, 57 bp, Artificial Sequence
  Description of Artificial Sequence: Synthetic primer
tcatttaccgggatttacagacaccgctcgctggacggtctgtgaggggctcgctgc

SEQ ID NO: 588 - DNA, 33 bp, Artificial Sequence
  Description of Artificial Sequence: Synthetic primer
gttgttgatcacgtctgctccagggacttcacc

SEQ ID NO: 589 - DNA, 48 bp, Artificial Sequence
  Description of Artificial Sequence: Synthetic primer
gttgtttctagattatcatttaccaggatttacagacaccgctcgctg

SEQ ID NO: 590 - DNA, 49 bp, Artificial Sequence
  Description of Artificial Sequence: Synthetic primer
gttgttttcgaaggatccgctttaccagatttacagacaccgctcgctg

SEQ ID NO: 591 - DNA, 48 bp, Artificial Sequence
  Description of Artificial Sequence: Synthetic primer
actcacacatccccaccgtccccagcatccaacccgagaggggtgagc

SEQ ID NO: 592 - DNA, 48 bp, Artificial Sequence
  Description of Artificial Sequence: Synthetic primer
tctgatcaggagcccaaatcttctgacaaaactcacacatccccaccg

SEQ ID NO: 593 - DNA, 48 bp, Artificial Sequence; identical to SEQ ID NO: 589
  Description of Artificial Sequence: Synthetic primer

SEQ ID NO: 594 - DNA, 33 bp, Artificial Sequence
  Description of Artificial Sequence: Synthetic primer
atctgttctcctcctactactcctcctccacct

SEQ ID NO: 595 - DNA, 45 bp, Artificial Sequence
  Description of Artificial Sequence: Synthetic primer
tcagtagcagatgccatctccctctgacatgatgacagacacgct

SEQ ID NO: 596 - DNA, 45 bp, Artificial Sequence
  Description of Artificial Sequence: Synthetic primer
gttgttgatcacatctgttctcctcctactactcctcctccacct

SEQ ID NO: 597 - DNA, 45 bp, Artificial Sequence
  Description of Artificial Sequence: Synthetic primer
gttgtttctagattatcaatctccctctgacatgatgacagacac

SEQ ID NO: 598 - DNA, 39 bp, Artificial Sequence
  Description of Artificial Sequence: Synthetic primer
gttcttcgaaggatccgcatctccctctgacatgatgac

SEQ ID NO: 599 - DNA, 38 bp, Artificial Sequence
  Description of Artificial Sequence: Synthetic primer
tctatcaggaaccctcagctctaccccttgaagccctg

SEQ ID NO: 600 - DNA, 48 bp, Artificial Sequence
  Description of Artificial Sequence: Synthetic primer
gttgtttctagattatcaggatggacggagggaggtgttaccaaggct

SEQ ID NO: 601 - DNA, 42 bp, Artificial Sequence
  Description of Artificial Sequence: Synthetic primer
gttgttgatcacgttcgacctgtcaacatcactgagcccacc

SEQ ID NO: 602 - DNA, 48 bp, Artificial Sequence; identical to SEQ ID NO: 600
  Description of Artificial Sequence: Synthetic primer

SEQ ID NO: 603 - DNA, 42 bp, Artificial Sequence
  Description of Artificial Sequence: Synthetic primer
gttgttttcgaaggatccgcggatggacggagggaggtgtta

SEQ ID NO: 604 - DNA, 45 bp, Artificial Sequence
  Description of Artificial Sequence: Synthetic primer
gttgttaccggtgcaatgcggactgaagatctcccaaaggctgtg

SEQ ID NO: 605 - DNA, 42 bp, Artificial Sequence
  Description of Artificial Sequence: Synthetic primer
gttgtttgatcagccaaaccttgagtgatggtgatgttcaca

SEQ ID NO: 606 - DNA, 42 bp, Artificial Sequence
  Description of Artificial Sequence: Synthetic primer
gttgttaagcttgccgccatggattcacaggcccaggttctt

SEQ ID NO: 607 - DNA, 42 bp, Artificial Sequence
  Description of Artificial Sequence: Synthetic primer
gttgttgtcgacattgtgatgtcacagtctccatcctcccta

SEQ ID NO: 608 - DNA, 39 bp, Artificial Sequence
  Description of Artificial Sequence: Synthetic primer
tcagtgctgatcatgaggagacggtgactgaggttcctt

SEQ ID NO: 609 - DNA, 60 bp, Artificial Sequence
  Description of Artificial Sequence: Synthetic primer
tcgggcggtggtgggtcgggtggcggcggatcgtcacaggtgcagttgaaggagtcagga

SEQ ID NO: 610 - DNA, 63 bp, Artificial Sequence
  Description of Artificial Sequence: Synthetic primer
acccgacccaccaccgcccgagccaccgccaccttttatttccagcttggtgccacctccgaa

SEQ ID NO: 611 - DNA, 42 bp, Artificial Sequence
  Description of Artificial Sequence: Synthetic primer
gttgttaagcttgccgccatgaggttctctgctcagcttctg

SEQ ID NO: 612 - DNA, 44 bp, Artificial Sequence
  Description of Artificial Sequence: Synthetic primer
gttgttgtcgacatttgtgatgacgcaggctgcattctccaatt

SEQ ID NO: 613 - DNA, 40 bp, Artificial Sequence
  Description of Artificial Sequence: Synthetic primer
tcagtgctgatcagaggaggacggtgactgaggttccttg

SEQ ID NO: 614 - DNA, 59 bp, Artificial Sequence
  Description of Artificial Sequence: Synthetic primer
cgggcggtggtgggtcgggtggcggcggatcgtcacaggtgcagctgaagcagtcagga

SEQ ID NO: 615 - DNA, 59 bp, Artificial Sequence
  Description of Artificial Sequence: Synthetic primer
cccgacccaccaccgcccgagccaccgccacccttcagctccagcttggtgccagcacc

SEQ ID NO: 616 - DNA, 48 bp, Artificial Sequence
  Description of Artificial Sequence: Synthetic primer
gttgttaagcttgccgccatgaagttgcctgttaggctgttggtgctg

SEQ ID NO: 617 - DNA, 66 bp, Artificial Sequence
  Description of Artificial Sequence: Synthetic primer
agagctcccacctcctccagatccaccaccgcccgagccaccgccatctttgatttccagcttggt

SEQ ID NO: 618 - DNA, 51 bp, Artificial Sequence
  Description of Artificial Sequence: Synthetic primer
tttcagagtaatctgagagctcccacctcctccagatccaccaccgcccga

SEQ ID NO: 619 - DNA, 39 bp, Artificial Sequence
  Description of Artificial Sequence: Synthetic primer
tcagtgctgatcatgcagagagacagtgaccagagtccc

SEQ ID NO: 620 - DNA, 60 bp, Artificial Sequence
  Description of Artificial Sequence: Synthetic primer
ggcggatctctgcagatccagttggtgcagtctggacctgagtcgaagaagcctggagag

SEQ ID NO: 621 - DNA, 19 bp, Artificial Sequence
  Description of Artificial Sequence: Synthetic primer
ggacagtgggagtggcacc

SEQ ID NO: 622 - DNA, 44 bp, Artificial Sequence
  Description of Artificial Sequence: Synthetic primer
caggttcagctgcagcagtctggggctgagtcggtgaggcctgg

SEQ ID NO: 623 - DNA, 27 bp, Artificial Sequence
  Description of Artificial Sequence: Synthetic primer
ggaggattcgtctgcagtcagagtggc

SEQ ID NO: 624 - DNA, 61 bp, Artificial Sequence
  Description of Artificial Sequence: Synthetic primer
ggagatggttttctcgatgggggctgggagggctttgttggagaccgagcacttgtactcc

SEQ ID NO: 625 - DNA, 19 bp, Artificial Sequence
  Description of Artificial Sequence: Synthetic primer
ggacagtgggagtggcacc

SEQ ID NO: 626 - DNA, 61 bp, Artificial Sequence
  Description of Artificial Sequence: Synthetic primer
ccgtctctgatcaggagcccaaatcttctgacaaaactcacacatccccaccgtccccagc

SEQ ID NO: 627 - DNA, 65 bp, Artificial Sequence
  Description of Artificial Sequence: Synthetic primer
tccccaccgtccccagcacctgaactcctggggggatcgtcagtcttcctcttccccccaaaacc

SEQ ID NO: 628 - DNA, 17 bp, Artificial Sequence
  Description of Artificial Sequence: Synthetic primer
caggaaacagctatgac

SEQ ID NO: 629 - DNA, 61 bp, Artificial Sequence
  Description of Artificial Sequence: Synthetic primer
ccgtctctgatcaggaccccaaatcttgtgacaaaactcacacatccccaccgtccccagc

SEQ ID NO: 630 - DNA, 65 bp, Artificial Sequence; identical to SEQ ID NO: 627
  Description of Artificial Sequence: Synthetic primer

SEQ ID NO: 631 - DNA, 61 bp, Artificial Sequence; identical to SEQ ID NO: 626
  Description of Artificial Sequence: Synthetic primer

SEQ ID NO: 632 - DNA, 74 bp, Artificial Sequence
  Description of Artificial Sequence: Synthetic primer
gcagggtgtacacctgtggttctcggggctgccctttggctttggagatggttttctcgatggaggctgggagg

SEQ ID NO: 633 - DNA, 61 bp, Artificial Sequence; identical to SEQ ID NO: 629
  Description of Artificial Sequence: Synthetic primer

SEQ ID NO: 634 - DNA, 74 bp, Artificial Sequence; identical to SEQ ID NO: 632
  Description of Artificial Sequence: Synthetic primer

SEQ ID NO: 635 - DNA, 59 bp, Artificial Sequence
  Description of Artificial Sequence: Synthetic primer
ttcctcttccccccaaaacccaaggacaccctcatgatctcccggaaccctgaggtcac

SEQ ID NO: 636 - DNA, 19 bp, Artificial Sequence
  Description of Artificial Sequence: Synthetic primer
ggacagtgggagtggcacc

SEQ ID NO: 637 - DNA, 61 bp, Artificial Sequence; identical to SEQ ID NO: 626
  Description of Artificial Sequence: Synthetic primer

SEQ ID NO: 638 - DNA, 65 bp, Artificial Sequence; identical to SEQ ID NO: 627
  Description of Artificial Sequence: Synthetic primer

SEQ ID NO: 639 - protein, 4 aa, Artificial Sequence
  Description of Artificial Sequence: Synthetic peptide
RTPE

SEQ ID NO: 640 - protein, 4 aa, Artificial Sequence
  Description of Artificial Sequence: Synthetic peptide
QNAK

SEQ ID NO: 641 - DNA, 63 bp, Artificial Sequence
  Description of Artificial Sequence: Synthetic primer
ttcctcttccccccaaaacccaaggacaccctcatgatctcccagaacgctaaggtcacatgc

SEQ ID NO: 642 - DNA, 61 bp, Artificial Sequence; identical to SEQ ID NO: 626
  Description of Artificial Sequence: Synthetic primer

SEQ ID NO: 643 - DNA, 65 bp, Artificial Sequence; identical to SEQ ID NO: 627
  Description of Artificial Sequence: Synthetic primer

SEQ ID NO: 644 - DNA, 61 bp, Artificial Sequence; identical to SEQ ID NO: 626
  Description of Artificial Sequence: Synthetic primer

SEQ ID NO: 645 - DNA, 22 bp, Artificial Sequence
  Description of Artificial Sequence: Synthetic primer
gctcccgcggctgtgtcttggc

SEQ ID NO: 646 - DNA, 61 bp, Artificial Sequence; identical to SEQ ID NO: 626
  Description of Artificial Sequence: Synthetic primer

SEQ ID NO: 647 - DNA, 59 bp, Artificial Sequence
  Description of Artificial Sequence: Synthetic primer
ggaggtgggcagggtgtacacctgtggttctcggggctgccctttgggtttggagatgg

SEQ ID NO: 648 - DNA, 91 bp, Artificial Sequence; identical to SEQ ID NO: 99
  Description of Artificial Sequence: Synthetic primer

SEQ ID NO: 649 - DNA, 33 bp, Artificial Sequence
  Description of Artificial Sequence: Synthetic primer
gttgtttctagattatcatttacccggagacag

SEQ ID NO: 650 - DNA, 45 bp, Artificial Sequence
  Description of Artificial Sequence: Synthetic primer
gttgttaagcttgccgccatggagacagacacactcctgctatgg

SEQ ID NO: 651 - DNA, 60 bp, Artificial Sequence
  Description of Artificial Sequence: Synthetic primer
gccacccgacccaccaccgcccgagccaccgccacctttgatttccagcttggtgcctcc

SEQ ID NO: 652 - DNA, 33 bp, Artificial Sequence
  Description of Artificial Sequence: Synthetic primer
gttgttgtcgacattgtgctgacccaatctcca

SEQ ID NO: 653 - DNA, 59 bp, Artificial Sequence
  Description of Artificial Sequence: Synthetic primer
tcgggcggtggtgggtcgggtggcggcggatcgtcacaggttcagctgcagcagtctgg

SEQ ID NO: 654 - DNA, 39 bp, Artificial Sequence
  Description of Artificial Sequence: Synthetic primer
tcagtgctgatcagaggagacggtgactgaggttccttg

SEQ ID NO: 655 - DNA, 48 bp, Artificial Sequence
  Description of Artificial Sequence: Synthetic primer
gttgttaagcttgccgccatggattttcaagtgcagattttcagcttc

SEQ ID NO: 656 - DNA, 63 bp, Artificial Sequence
  Description of Artificial Sequence: Synthetic primer
gccacccgacccaccaccgcccgagccaccgccaccagagagctctttcagctccagcttggt

SEQ ID NO: 657 - DNA, 46 bp, Artificial Sequence
  Description of Artificial Sequence: Synthetic primer
gttgttgtcgacattgttctctcccagtctccagcaatcctgtctg

SEQ ID NO: 658 - DNA, 57 bp, Artificial Sequence
  Description of Artificial Sequence: Synthetic primer
tcgggcggtggtgggtcgggtggcggcggatctctgcagatccagttggtgcagtct

SEQ ID NO: 659 - DNA, 39 bp, Artificial Sequence
  Description of Artificial Sequence: Synthetic primer
tcagtgctgatcagaggagactgtgagagtggtgccttg

SEQ ID NO: 660 - DNA, 90 bp, Artificial Sequence
  Description of Artificial Sequence: Synthetic primer
gttgtagatcaggagcccaaatcttctgacaaaactcacacatctccaccgtccccagcacctgaactcctgggggaccgtcagtcttcc

SEQ ID NO: 661 - DNA, 59 bp, Artificial Sequence
  Description of Artificial Sequence: Synthetic primer
gttgttttcgaaggatccgctttacccgggagcagggagaggctcttctgcgtgtagtg

SEQ ID NO: 662 - DNA, 36 bp, Artificial Sequence
  Description of Artificial Sequence: Synthetic primer
gttgttgatcagccagttccctcaactccacctacc

SEQ ID NO: 663 - DNA, 44 bp, Artificial Sequence
  Description of Artificial Sequence: Synthetic primer
gttgttttcgaaggatccgcgtccacctccgccatgacaacaga

SEQ ID NO: 664 - DNA, 33 bp, Artificial Sequence; identical to SEQ ID NO: 588
  Description of Artificial Sequence: Synthetic primer

SEQ ID NO: 665 - DNA, 49 bp, Artificial Sequence; identical to SEQ ID NO: 590
  Description of Artificial Sequence: Synthetic primer

SEQ ID NO: 666 - DNA, 45 bp, Artificial Sequence; identical to SEQ ID NO: 199
  Description of Artificial Sequence: Synthetic primer

SEQ ID NO: 667 - DNA, 45 bp, Artificial Sequence
  Description of Artificial Sequence: Synthetic primer
gttgttatcgatctcgagtcagggtgtttctgaggaagacacagt

SEQ ID NO: 668 - DNA, 60 bp, Artificial Sequence
  Description of Artificial Sequence: Synthetic primer
gttgtagatctggagcccagagggcccacaatcaagccctctcctccaagcaaaagccca

SEQ ID NO: 669 - DNA, 42 bp, Artificial Sequence
  Description of Artificial Sequence: Synthetic primer
gttgttttcgaaggatccgctttacccggagtccgggagaag

SEQ ID NO: 670 - DNA, 49 bp, Artificial Sequence
  Description of Artificial Sequence: Synthetic primer
gttgttggatccttcgaacatggagaacaacaaaacctcagtggattca

SEQ ID NO: 671 - DNA, 45 bp, Artificial Sequence; identical to SEQ ID NO: 204
  Description of Artificial Sequence: Synthetic primer

SEQ ID NO: 672 - DNA, 46 bp, Artificial Sequence; identical to SEQ ID NO: 205
  Description of Artificial Sequence: Synthetic primer

SEQ ID NO: 673 - DNA, 48 bp, Artificial Sequence; identical to SEQ ID NO: 206
  Description of Artificial Sequence: Synthetic primer

SEQ ID NO: 674 - DNA, 45 bp, Artificial Sequence; identical to SEQ ID NO: 207
  Description of Artificial Sequence: Synthetic primer

SEQ ID NO: 675 - DNA, 48 bp, Artificial Sequence; identical to SEQ ID NO: 208
  Description of Artificial Sequence: Synthetic primer

SEQ ID NO: 676 - DNA, 45 bp, Artificial Sequence; identical to SEQ ID NO: 209
  Description of Artificial Sequence: Synthetic primer

SEQ ID NO: 677 - DNA, 48 bp, Artificial Sequence; identical to SEQ ID NO: 210
  Description of Artificial Sequence: Synthetic primer

SEQ ID NO: 678 - DNA, 44 bp, Artificial Sequence
  Description of Artificial Sequence: Synthetic primer
gttgttgtcgacattgttctgactcagtctccagccaccctgtc

SEQ ID NO: 679 - DNA, 35 bp, Artificial Sequence
  Description of Artificial Sequence: Synthetic primer
gttgttgatcagagacagtgaccagtgtcccttgg

SEQ ID NO: 680 - protein, 5 aa, Artificial Sequence
  Description of Artificial Sequence: Synthetic peptide
VTVSS

SEQ ID NO: 681 - protein, 4 aa, Artificial Sequence
  Description of Artificial Sequence: Synthetic hinge construct
SSSP

SEQ ID NO: 682 - protein, 15 aa, Artificial Sequence
  Description of Artificial Sequence: Synthetic peptide linker
DGGGSGGGGSGGGGS

SEQ ID NO: 683 - protein, 24 aa, Artificial Sequence
  Description of Artificial Sequence: Synthetic hinge construct
PASPSPTPPTSPSPTPPTSPVPQD

SEQ ID NO: 684 - protein, 234 aa, Homo sapiens
DQEPKSCDKTHTCPPCPAPELLGGPSVFLFPPKPKDTLMISRTPEVTCVVVDVSHEDPEVKFNWYVDGVEVHNAKTKPREEQYNSTYRVVSVLTVLHQDWLNGKEYKCKVSNKALPAPIEKTISKAKGQPREPQVYTLPPSRDELTKNQVSLTCLVKGFYPSDIAVEWESNGQPENNYKTTPPVLDSDGSFFLYSKLTVDKSRWQQGNVFSCSVMHEALHNHYTQKSLSLSPGK

SEQ ID NO: 685 - protein, 248 aa, Lama glama
  MOD_RES (189): Variable amino acid
  MOD_RES (208): Variable amino acid
  MOD_RES (211): Variable amino acid
DQEPKTPKPQPQPQPQPNPTTESKCPKCPAPELLGGPSVFIFPPKPKDVLSISGRPEVTCVVVDVGQEDPEVSFNWYIDGTAEVRANTRPKEEQFNSTYRVVSVLPIQHQDWLTGKEFKCKVNNKALPAPIEKTISKAKGQTREPQVYTLAPHREELAKDTVSVTCLVKGFYPPDINVEWQRNGQPESXGTYATTPPQLDNDGTYFLXSKXSVGKNTWQQGETFTCVVMHEALHNHYTQKSITQSSGK

SEQ ID NO: 686 - protein, 231 aa, Lama glama; identical to SEQ ID NO: 4

SEQ ID NO: 687 - protein, 234 aa, Lama glama
AHHSEDPTSKCPKCPGPELLGGPTVFIFPPKAKDVLSITRKPEVTCLWWTWVKKTLRSSSSWSVDDTEVHTAETKPKEEQFNSTYRVVSVLPIQHQDWLTGKEFKCKVNNKALPAPIERTISKAKGQTREPQVYTLAPHREELAKDTVSVTCLVKGFFPADINVEWQRNGQPESEGTYANTPPQLDNDGTYFLYSKLSVGKNTWQQGEVFTCVVMHEALHNHSTQKSITQSSGK

SEQ ID NO: 688 - DNA, 1518 bp, Artificial Sequence
  Description of Artificial Sequence: Synthetic nucleotide sequence
  CDS (13)..(1509)
aagcttgccgccatggattttcaagtgcagattttcagcttcctgctaatcagtgcttcagtcataattgccagaggacaaattgttctctcccagtctccagcaatcctgtctgcatctccaggggagaaggtcacaatgacttgcagggccagctcaagtgtaagttacatgcactggtaccagcagaagccaggatcctcccccaaaccctggatttatgccccatccaacctggcttctggagtccctgctcgcttcagtggcagtgggtctgggacctcttactctctcacaatcagcagagtggaggctgaagatgctgccacttattactgccagcagtggagttttaacccacccacgttcggtgctgggaccaagctggagctgaaaggtggcggtggctcgggcggtggtggatctggaggaggtgggagctctcaggcttatctacagcagtctggggctgagctggtgaggcctggggcctcagtgaagatgtcctgcaaggcttctggctacacatttaccagttacaatatgcactgggtaaagcagacacctagacagggcctggaatggattggagctatttatccaggaaatggtgatacttcctacaatcagaagttcaagggcaaggccacactgactgtagacaaatcctccagcacagcctacatgcagctcagcagcctgacatctgaagactctgcggtctatttctgtgcaagagtggtgtactatagtaactcttactggtacttcgatgtctggggcacagggaccacggtcaccgtctctgatcaggagcccaaatcttgtgacaaaactcacacatgcccaccgtgcccagcacctgaactcctggggggaccgtcagtcttcctcttccccccaaaacccaaggacaccctcatgatctcccggacccctgaggtcacatgcgtggtggtggacgtgagccacgaagaccctgaggtcaagttcaactggtacgtggacggcgtggaggtgcataatgccaagacaaagccgcgggaggagcagtacaacagcacgtaccgtgtggtcagcgtcctcaccgtcctgcaccaggactggctgaatggcaaggagtacaagtgcaaggtctccaacaaagccctcccagcccccatcgagaaaacaatctccaaagccaaagggcagccccgagaaccacaggtgtacaccctgcccccatcccgggatgagctgaccaagaaccaggtcagcctgacctgcctggtcaaaggcttctatcccagcgacatcgccgtggagtgggagagcaatgggcagccggagaacaactacaagaccacgcctcccgtgctggactccgacggctccttcttcctctacagcaagctcaccgtggacaagagcaggtggcagcaggggaacgtcttctcatgctccgtgatgcatgaggctctgcacaaccactacacgcagaagagcctctccctgtctccgggtaaatgatctaga

SEQ ID NO: 689 - protein, 499 aa, Artificial Sequence
  Description of Artificial Sequence: Synthetic amino acid sequence
MDFQVQIFSFLLISASVIIARGQIVLSQSPAILSASPGEKVTMTCRASSSVSYMHWYQQKPGSSPKPWIYAPSNLASGVPARFSGSGSGTSYSLTISRVEAEDAATYYCQQWSFNPPTFGAGTKLELKGGGGSGGGGSGGGGSSQAYLQQSGAELVRPGASVKMSCKASGYTFTSYNMHWVKQTPRQGLEWIGAIYPGNGDTSYNQKFKGKATLTVDKSSSTAYMQLSSLTSEDSAVYFCARVVYYSNSYWYFDVWGTGTTVTVSDQEPKSCDKTHTCPPCPAPELLGGPSVFLFPPKPKDTLMISRTPEVTCVVVDVSHEDPEVKFNWYVDGVEVHNAKTKPREEQYNSTYRVVSVLTVLHQDWLNGKEYKCKVSNKALPAPIEKTISKAKGQPREPQVYTLPPSRDELTKNQVSLTCLVKGFYPSDIAVEWESNGQPENNYKTTPPVLDSDGSFFLYSKLTVDKSRWQQGNVFSCSVMHEALHNHYTQKSLSLSPGK

SEQ ID NO: 690 - DNA, 1470 bp, Artificial Sequence
  Description of Artificial Sequence: Synthetic nucleotide sequence
  CDS (13)..(1458)
aagcttgccgccatggattttcaagtgcagattttcagcttcctgctaatcagtgcttcagtcataattgccagaggacaaattgttctctcccagtctccagcaatcctgtctgcatctccaggggagaaggtcacaatgacttgcagggccagctcaagtgtaagttacatgcactggtaccagcagaagccaggatcctcccccaaaccctggatttatgccccatccaacctggcttctggagtccctgctcgcttcagtggcagtgggtctgggacctcttactctctcacaatcagcagagtggaggctgaagatgctgccacttattactgccagcagtggagttttaacccacccacgttcggtgctgggaccaagctggagctgaaaggtggcggtggctcgggcggtggtggatctggaggaggtgggagctctcaggcttatctacagcagtctggggctgagctggtgaggcctggggcctcagtgaagatgtcctgcaaggcttctggctacacatttaccagttacaatatgcactgggtaaagcagacacctagacagggcctggaatggattggagctatttatccaggaaatggtgatacttcctacaatcagaagttcaagggcaaggccacactgactgtagacaaatcctccagcacagcctacatgcagctcagcagcctgacatctgaagactctgcggtctatttctgtgcaagagtggtgtactatagtaactcttactggtacttcgatgtctggggcacagggaccacggtcaccgtctctgatccaagaaggttggacaagatagaagatgaaaggaatcttcatgaagattttgtattcatgaaaacgatacagagatgcaacacaggagaaagatccttatccttactgaactgtgaggagattaaaagccagtttgaaggctttgtgaaggatataatgttaaacaaagaggagacgaagaaagaaaacagctttgaaatgcaaaaaggtgatcagaatcctcaaattgcggcacatgtcataagtgaggccagcagtaaaacaacatctgtgttacagtgggctgaaaaaggatactacaccatgagcaacaacttggtaaccctggaaaatgggaaacagctgaccgttaaaagacaaggactctattatatctatgcccaagtcaccttctgttccaatcgggaagcttcgagtcaagctccatttatagccagcctctgcctaaagtcccccggtagattcgagagaatcttactcagagctgcaaatacccacagttccgccaaaccttgcgggcaacaatccattcacttgggaggagtatttgaattgcaaccaggtgcttcggtgtttgtcaatgtgactgatccaagccaagtgagccatggcactggcttcacgtcctttggcttactcaaactcgagtgataatctaga

SEQ ID NO: 691 - protein, 482 aa, Artificial Sequence
  Description of Artificial Sequence: Synthetic amino acid sequence
MDFQVQIFSFLLISASVIIARGQIVLSQSPAILSASPGEKVTMTCRASSSVSYMHWYQQKPGSSPKPWIYAPSNLASGVPARFSGSGSGTSYSLTISRVEAEDAATYYCQQWSFNPPTFGAGTKLELKGGGGSGGGGSGGGGSSQAYLQQSGAELVRPGASVKMSCKASGYTFTSYNMHWVKQTPRQGLEWIGAIYPGNGDTSYNQKFKGKATLTVDKSSSTAYMQLSSLTSEDSAVYFCARVVYYSNSYWYFDVWGTGTTVTVSDPRRLDKIEDERNLHEDFVFMKTIQRCNTGERSLSLLNCEEIKSQFEGFVKDIMLNKEETKKENSFEMQKGDQNPQIAAHVISEASSKTTSVLQWAEKGYYTMSNNLVTLENGKQLTVKRQGLYYIYAQVTFCSNREASSQAPFIASLCLKSPGRFERILLRAANTHSSAKPCGQQSIHLGGVFELQPGASVFVNVTDPSQVSHGTGFTSFGLLKLE

SEQ ID NO: 692 - DNA, 1290 bp, Artificial Sequence
  Description of Artificial Sequence: Synthetic nucleotide sequence
  CDS (13)..(1278)
aagcttgccgccatggattttcaagtgcagattttcagcttcctgctaatcagtgcttcagtcataattgccagaggacaaattgttctctcccagtctccagcaatcctgtctgcatctccaggggagaaggtcacaatgacttgcagggccagctcaagtgtaagttacatgcactggtaccagcagaagccaggatcctcccccaaaccctggatttatgccccatccaacctggcttctggagtccctgctcgcttcagtggcagtgggtctgggacctcttactctctcacaatcagcagagtggaggctgaagatgctgccacttattactgccagcagtggagttttaacccacccacgttcggtgctgggaccaagctggagctgaaaggtggcggtggctcgggcggtggtggatctggaggaggtgggagctctcaggcttatctacagcagtctggggctgagctggtgaggcctggggcctcagtgaagatgtcctgcaaggcttctggctacacatttaccagttacaatatgcactgggtaaagcagacacctagacagggcctggaatggattggagctatttatccaggaaatggtgatacttcctacaatcagaagttcaagggcaaggccacactgactgtagacaaatcctccagcacagcctacatgcagctcagcagcctgacatctgaagactctgcggtctatttctgtgcaagagtggtgtactatagtaactcttactggtacttcgatgtctggggcacagggaccacggtcaccgtctctgatccagaaaacagctttgaaatgcaaaaaggtgatcagaatcctcaaattgcggcacatgtcataagtgaggccagcagtaaaacaacatctgtgttacagtgggctgaaaaaggatactacaccatgagcaacaacttggtaaccctggaaaatgggaaacagctgaccgttaaaagacaaggactctattatatctatgcccaagtcaccttctgttccaatcgggaagcttcgagtcaagctccatttatagccagcctctgcctaaagtcccccggtagattcgagagaatcttactcagagctgcaaatacccacagttccgccaaaccttgcgggcaacaatccattcacttgggaggagtatttgaattgcaaccaggtgcttcggtgtttgtcaatgtgactgatccaagccaagtgagccatggcactggcttcacgtcctttggcttactcaaactcgagtgataatctaga

SEQ ID NO: 693 - protein, 422 aa, Artificial Sequence
  Description of Artificial Sequence: Synthetic amino acid sequence
MDFQVQIFSFLLISASVIIARGQIVLSQSPAILSASPGEKVTMTCRASSSVSYMHWYQQKPGSSPKPWIYAPSNLASGVPARFSGSGSGTSYSLTISRVEAEDAATYYCQQWSFNPPTFGAGTKLELKGGGGSGGGGSGGGGSSQAYLQQSGAELVRPGASVKMSCKASGYTFTSYNMHWVKQTPRQGLEWIGAIYPGNGDTSYNQKFKGKATLTVDKSSSTAYMQLSSLTSEDSAVYFCARVVYYSNSYWYFDVWGTGTTVTVSDPENSFEMQKGDQNPQIAAHVISEASSKTTSVLQWAEKGYYTMSNNLVTLENGKQLTVKRQGLYYIYAQVTFCSNREASSQAPFIASLCLKSPGRFERILLRAANTHSSAKPCGQQSIHLGGVFELQPGASVFVNVTDPSQVSHGTGFTSFGLLKLE

SEQ ID NO: 694 - protein, 159 aa, Homo sapiens
KCCVECPPCPAPPVAGPSVFLFPPKPKDTLMISRTPEVTCVVVDVSHEDPEVQFNWYVDGMEVHNAKTKPREEQFNSTFFRVVSVLTVVHQDWLNGKEYKCKVSNKGLPAPIEKTISKTKGQPREPQVYTLPPSREEMTKNQVSLTCLVKGFYPSDIAV

SEQ ID NO: 695 - protein, 160 aa, Homo sapiens
DTPPPCPRCPAPELLGGPSVFLFPPKPKDTLMISRTPEVTCVVVDVSHEDPEVQFKWYVDGVEVHNAKTKPWEEQYNSTFFRVVSVLTVLHQDWLNGKEYKCKVSNKALPAPIEKTISKTKGQPREPQVYTLPPSREEMTKNQVSLTCLVKGFYPSDIAM

SEQ ID NO: 696 - protein, 160 aa, Homo sapiens
  MOD_RES (95): Variable amino acid
  MOD_RES (105): Variable amino acid
  MOD_RES (118): Variable amino acid
  MOD_RES (120): Variable amino acid
KYGPPCPSCPAPEFLGGPSVFLFPPKPKDTLMISRTPEVTCVVVDVSQEDPEVQFNWYVDGVEVHNAKTKPREEQFNSTYYRVVSVLTVLHQDWLXGKEYKCKVSXKGLPSSIEKTISXAXGQPREPQVYTLPPSQEEMTKNQVSLTCLVKGFYPSDIAV

SEQ ID NO: 697 - protein, 160 aa, Homo sapiens
DKTHTCPPCPAPELLGGPSVFLFPPKPKDTLMISRTPEVTCVVVDVSHEDPEVKFNWYVDGVEVHNAKTKPREEQYNSTYYRVVSVLTVLHQDWLNGKEYKCKVSNKALPAPIEKTISKAKGQPREPQVYTLPPSRDELTKNQVSLTCLVKGFYPSDIAV

SEQ ID NO: 698 - protein, 160 aa, Homo sapiens
PTCPTCHKCPVPELLGGPSVFIFPPKPKDILLISQNAKVTCVVVDVSEEEPDVQFSWFVNNVEVHTAQTQPREEQYNSTFFRVVSALPIQHQDWMSGKEFKCKVNNKALPSPIEKTISKPKGLVRKPQVYVMGPPTEQLTEQTVSLTCLTSGFLPNDIGV

SEQ ID NO: 699 - protein, 154 aa, Homo sapiens
PCPCPAPELLGGPSVFLFPPKPKDTLMISRTPEVTCVVVDVSHEDPEVQFNWYVDGVEVHNAKTKPREEQYNSTFFRVVSVLTVLHQDWLNGKEYKCKVSNKALPAPIEKTISKKGQPREPQVYTLPPSREEMTKNQVSLTCLVKGFYPSDIAV
